(19) United States
(12) Patent Application Publication
(10) Pub. No.: US 2010/0119535 A1
(43) Pub. Date: May 13, 2010

(54) COMPOSITIONS AND METHODS FOR IMMUNODOMINANT ANTIGENS

(75) Inventors: Philip Felgner, Rancho Santa Fe, CA (US); David Huw Davies, Long Beach, CA (US); Xiaowu Liang, La Jolla, CA (US)

Correspondence Address: FISH & ASSOCIATES, PC;ROBERT D. FISH, 2603 Main Street, Suite 1000, Irvine, CA, 92614-6232, US

(73) Assignee: IMMPORT THERAPEUTICS, INC., Irvine, CA (US)

(21) Appl. No.: 12/447,620

(22) PCT Filed: Nov. 1, 2007
(86) PCT No.: PCT/US07/23299

§ 371 Date: Dec. 3, 2009

Related U.S. Application Data
(60) Provisional application No. 60/856,217, filed on Nov. 1, 2006.

(51) Int. Cl. A61K 39/12; A61K 39/02

(52) U.S. Cl. 424/186.1; 424/190.1

(57) ABSTRACT

Contemplated compositions, devices, and methods comprise immunodominant antigens from selected human pathogens (Burkholderia pseudomallei, Borrelia burgdorferi, Brucella melitensis, Chlamydia muridarum, Coxiella burnetii, Francisella tularensis, human Herpes virus 1 and 2, Mycobacterium tuberculosis, Plasmodium falciparum, and Vaccinia virus) can be used as a vaccine, as diagnostic markers, and as therapeutic agents. In particularly preferred aspects, the antigens have quantified and known relative reactivities with respect to sera of a population infected with the pathogen, and have a known association with a disease parameter.

[0001] This application claims priority to our copending U.S. provisional patent application with the Ser. No. 60/856,217, which was filed Nov. 1, 2006.

### FIELD OF THE INVENTION

[0002] The field of the invention is immunodominant antigens from pathogens, especially as they relate to their use in diagnostic and therapeutic compositions and methods.

### BACKGROUND OF THE INVENTION

[0003] Antigens for vaccination and/or diagnostic purposes are typically single antigens from a pathogen, or complex mixtures of multiple and unknown antigens of a pathogen such as inactivated bacteria or viruses. Depending on the particular type of pathogen, single antigens may provide a quantifiable signal in diagnostic test. However, due to variations among individuals in their immune response profiles, single antigen tests are often not sufficient to obtain useful diagnostic information with useful specificity and sensitivity. In addition, where the single antigen is used as a vaccine, variability of individual immune response and potential prior exposure often limit usefulness of single antigens. Finally, while some complex mixtures of multiple and unknown antigens are useful for vaccine development, they typically carry the risk of adverse reactions, or even reactivation of the pathogen.

[0004] More recently, multivalent vaccine preparations have become available where in a single dose, multiple and distinct antigens, from multiple and distinct serotypes, of a single pathogenic organisms were combined (Prevnar™: Heptavalent vaccine against Streptococcus pneumoniae capsular serotypes 4, 6B, 9V, 14, 18C, 19F, and 23F). While such mixed preparations tend to provide a broader range of protection against different serotypes, various difficulties nevertheless remain. Most significantly, where a single antigen fails to elicit an immune response, coverage to the corresponding serotype is not present. Thus, combination of single defined antigens from several serotypes merely combines benefits and problems associated with the single antigens. Moreover, none of the heretofore known antigens is generally applicable to differentiate among stages, secondary infections, etc., as the signal is either impossible to deconvolute (e.g., compound signal from inactivated pathogen) or only provides a single data point.

[0005] Therefore, while numerous methods of identification and use of antigens are known in the art, all or almost all of them suffer from one or more disadvantages. Consequently, there remains a large, unmet need to provide improved compositions and methods of antigens for diagnostic and therapy.

### SUMMARY OF THE INVENTION

[0006] The present invention is directed to immunodominant antigens from various human pathogens wherein the antigens have predetermined reactivities to serum of a population of patients infected with the pathogen. Thus, immunodominant antigens will have a statistically high probability to elicit an immune response in a relatively large group of patients. Further, where the antigens are determined from selected sub-populations (e.g., primary infection, secondary infection, recovering, chronic etc.), the antigens also have a known association with a disease parameter.

[0007] In one aspect of the inventive subject matter, an antigen composition comprises two or more immunodominant antigens of a pathogenic organism and are associated with a carrier, wherein the antigens have quantified and known relative reactivities with respect to sera of a population infected with the organism, and wherein the antigens have a known association with a disease parameter. Most preferably, the antigens are polypeptides and are encoded by nucleic acids having a sequence according to SEQ ID NO:1 to SEQ ID NO:1150 (or comprise fragments thereof).

[0008] Thus, in some aspects, the pathogenic organism is Burkholderia pseudomallei, and the antigens are encoded by nucleic acids having a sequence according to SEQ ID NO:966 to SEQ ID NO:1150, or the pathogenic organism is Borrelia burgdorferi, and the antigens are encoded by nucleic acids having a sequence according to SEQ ID NO:546 to SEQ ID NO:637. In further aspects, the pathogenic organism is Chlamydia muridarum, and the antigens are encoded by nucleic acids having a sequence according to SEQ ID NO:1 to SEQ ID NO:134, or the pathogenic organism is Coxiella burnetii, and the antigens are encoded by nucleic acids having a sequence according to SEQ ID NO:678 to SEQ ID NO:713. In yet further aspects, the pathogenic organism is Francisella tulare, and the antigens are encoded by nucleic acids having a sequence according to SEQ ID NO:663 to SEQ ID NO:677, or the pathogenic organism is human Herpes virus 1, and the antigens are encoded by nucleic acids having a sequence according to SEQ ID NO:638 to SEQ ID NO:654, or the pathogenic organism is human Herpes virus 2, and the antigens are encoded by nucleic acids having a sequence according to SEQ ID NO:655 to SEQ ID NO:662. In still further aspects, the pathogenic organism is Mycobacterium tuberculosis, and the antigens are encoded by nucleic acids having a sequence according to SEQ ID NO:749 to SEQ ID NO:965, or the pathogenic organism is Plasmodium falciparum, and the antigens are encoded by nucleic acids having a sequence according to SEQ ID NO:135 to SEQ ID NO:445. In yet further aspects, the pathogenic organism is Brucella melitensis, and the antigens are encoded by nucleic acids having a sequence according to SEQ ID NO:446 to SEQ ID NO:545, or the pathogenic organism is Vaccinia virus, and the antigens are encoded by nucleic acids having a sequence according to SEQ ID NO:714 to SEQ ID NO:748.

[0009] It is further contemplated that the known reactivities may be characterized by a variety of factors, however, it is particularly preferred that the known reactivities are characterized by strength of immunogenicity and/or time course of the infection. Similarly, the particular parameter may vary among different pathogens, however, it is generally preferred that the parameter is a previous exposure to the pathogen, the duration of exposure to the pathogen, a chronic infection, at least partial immunity to infection with the pathogen, and/or an expected positive outcome upon treatment.

[0010] In another aspect of the inventive subject matter, the carrier is a pharmaceutically acceptable carrier, and the composition is formulated as a vaccine. In such aspects, it is generally preferred that the vaccine comprises multiple (e.g., at least two, four, or six) antigens, which may be from the same pathogen or distinct (serotypical or species) pathogens. Depending on the particular pathogen, it is contemplated that the antigens or fragments thereof are at least partially purified and/or recombinant.

[0011] Alternatively, the carrier may also be a solid carrier, and the plurality of antigens is disposed on the carrier in an array. In such arrays, it is generally preferred that the antigens are from at least two distinct pathogens, and/or have at least two distinct known reactivities and/or parameters. It is further contemplated that the antigens or fragments thereof may be in crude expression extracts, in partially purified form (e.g., purity of less than 60%), or in highly purified form (purity of at least 95%). The antigens in such arrays may be recombinant or native. Alternatively, solid phases need not be limited to planar arrays, but may also include beads, columns, dipstick-type formats, etc.

[0012] Various objects, features, aspects and advantages of the present invention will become more apparent from the following detailed description of preferred embodiments of the invention.

### BRIEF DESCRIPTION OF THE DRAWING

[0013] FIG. 1 is an exemplary matrix depicting antibody signals for selected antibody types with respect to potential antigens of an exemplary pathogen.

[0014] FIG. 2 is a graph illustrating the relative scarcity of antigen recognition of selected antibody types.

[0015] FIGS. 3A and 3B are exemplary graphs depicting the average signal intensities of a plurality of immune responses against various antigens of primary (A) and secondary (B) infections.

[0016] FIGS. 4A and 4B are exemplary scans of diagnostic arrays comprising multiple immunodominant antigens of multiple distinct pathogens depicting approximate quantities of antigens deposited (A) and their reaction against human serum of a patient infected with a pathogen.

### DETAILED DESCRIPTION

[0017] The inventors have discovered numerous immunodominant antigens from a variety of human pathogens capable of casing infection in humans, including: Burkholderia pseudomallei, Borrelia burgdorferi, Brucella melitensis, Chlamydia muridarum, Coxiella burnetii, Francisella tularensis, human Herpes virus 1 and 2, Mycobacterium tuberculosis, Plasmodium falciparum, and Vaccinia virus. Immunodominant antigens according to the inventive subject matter are encoded by nucleic acids having a sequence according to SEQ ID NO:1 to SEQ ID NO:1150, and it is generally contemplated that such antigens can be used by themselves, or more preferably, in combination with other antigens (typically also immunodominant antigens) in the manufacture of a diagnostic devices, therapeutic compositions, and vaccines.

[0018] As used herein, the term “immunodominant antigen” refers to an antigen that elicits in at least one stage of the disease production of one or more types of antibodies (e.g., IgG, IgA, IgE, IgM, etc.) in at least 40%, more typically at least 70%, and most typically at least 90% of a population exposed to the antigen, and wherein, when compared to other antigens of the same pathogen, the average binding affinity and/or average quantity of the antibodies produced in the patient in at least one stage of the disease is at least in the upper tertile, more typically upper quartile, and most typically upper quintile. Most typically, the average binding affinity and/or average quantity of the antibodies is reflected in the signal intensity and signal intensity can therefore be used as a surrogate marker for average binding affinity and/or average quantity of the antibodies. In further aspects, preferred immunodominant antigens are also characterized by a response in the test group that is considered statistically significant when compared with control signal intensity, wherein the significance level p is preferably equal or less than 0.1, more preferably equal or less than 0.05, and most preferably equal or less than 0.01.

[0019] In one aspect of the inventive subject matter, immunodominant antigens are identified from a proteome screen against sera of a population that has been previously exposed to the pathogen. Most preferably, the population is subdivided in several sub-populations to reflect various disease parameters, which can then be correlated with the so identified antigens. It is still further preferred that the screening also provides data on relative reactivities with respect to the antigens and sera of the populations/sub-populations.

[0020] With respect to the above pathogens, it is generally preferred that at least part of the pathogen's genome is obtained and all potential open reading frames and splice mutations thereof are determined in silico. Once the potential genes are identified, suitable primers are determined to provide amplicons of the entire Open Reading Frames (ORFs), or, less preferably, portions thereof, wherein the primers are preferably designed to allow facile subcloning into an expression system. Most preferably, the subcloning uses recombinase-based subcloning using unpurified PCR mixtures to avoid cloning bias, and the so obtained recombinant plasmids are polyclonally multiplied, which enables unbiased presentation of the amplicons. It is still further particularly preferred that the plasmid preparations are then subjected to an in vitro transcription/translation reaction to thereby provide the recombinant ORF peptide, which is then spotted or otherwise immobilized onto a suitable addressable carrier (e.g., membrane, bead, etc.).

[0021] It should be recognized that the so prepared proteomes can then be exposed to serum of a population of control individuals and/or population of individuals that are known to have current or previous exposure to the above pathogen from which the ORFs were prepared. Antibodies of the serum that bind to one or more of the ORFs are then detected using well known methods (e.g., secondary antibodies). In this manner, the entire proteome of the pathogen can be rapidly assessed for immunogenicity and potential binding with antibodies in serum. Various preferred aspects, compositions, and methods of proteome preparation are disclosed in our copending International patent application with the publication number WO 06/088492, which is incorporated by reference herein.

[0022] Therefore, and among various other advantages, it should be especially recognized that contemplated compositions and methods presented herein will allow for preparation of vaccines and diagnostic compositions comprising a plurality of antigens with known and predetermined affinity to target ORFs of a pathogen. As individual immune systems are known to exhibit significant variation with respect to antigen recognition, methods and compositions contemplated herein will allow statistically supported antigen identification to identify immunodominant antigens in a population of patient. Consequently, multiple targets can be used to elicit an immune response and/or detect a prior exposure, even where one or more of the targets may be evasive for detection or provide only a weak response.

[0023] With respect to the immunodominant sequences identified herein, it should be further appreciated that the sequences need not be complete ORFs, but that suitable sequences may also be partial sequences (e.g., synthetic, recombinant or isolated) that typically comprise at least part of an antigenic epitope. Thus, sequences contemplated herein may be identified as DNA sequences encoding the antigenic peptide (partial or entire ORF), or may be identified as peptide sequence (or homologs thereof). Similarly, chemically modified antigens, and/or orthologs of the polypeptides presented herein are also deemed suitable for use herein.

[0024] It should be particularly noted that while proteome screening will provide a plurality of antigens as potentially useful molecules for diagnosis, vaccination, and/or therapy, such an approach only provides a raw cut of (a plurality) of individual responses. Thus, as most individual immune reactions towards the same pathogen elicit a significantly distinct profile of antibodies (e.g., depending on disease stage, previous exposure, and/or inter-individual variability), results obtained from such screening are typically inhomogeneous. Consequently, variability of the individual immune responses and variability of the quantity of recombinant protein in the array must be taken into consideration to obtain meaningful results.

[0025] Therefore, it should be appreciated that filtering of raw data will result in a collection of antigens with quantified and known relative reactivities with respect to sera of a population infected with the pathogen. Moreover, it should be noted that as signals may be specific to a particular stage in the course of an infection, relative reactivities may be indicative of the time course of the infection, and/or relative reactivities may represent differences in the strength of immunogenicity of the particular antigen (or quantity of deposited antigen in the screening assay). Additionally, it should be particularly recognized that depending on the choice of the specific patient population, the tested sera will reflect the immune status of a population that is characterized by one or more parameters of the disease. For example, populations may be observed that are infected or not infected, that had a long-term exposure or chronic infection, that had spontaneous recovery, that represents a group of responders (or non-responders) to a particular drug treatment, or that had at least partial immunity to the pathogen.

[0026] In still further contemplated aspects, immunodominant antigens are identified by selecting for an antigen (preferably within a well-defined sub-population) that (a) produces in at least 40-50% of a population a measurable signal, and (b) has a signal strength of at least 40% of the overall average signal intensity. However, and more preferably, the signal strength will be at least above average of the overall average signal intensity, and even more preferably in the upper tertile (quartile, or even quintile) of signal intensities in the assay. Therefore, and viewed from another perspective, immunodominant antigens will preferably be selected in a comparison of at least two series of tests, wherein one series of tests is typically the sub-population (e.g., primary infection, secondary infection, recovering, chronic, etc.) and the other series of tests is the control group (e.g., other sub-population or control group). Still further, it is generally preferred that the series of tests also include a negative control against which the potential immunodominant antigens are compared.

[0027] Consequently, and with particular respect to the pathogens presented herein, it should be appreciated that compositions comprising one or more selected immunodominant antigens can be prepared that will have a statistically high probability to elicit or have elicited an immune response in a relatively large group of patients. Further, where the antigens are determined from selected sub-populations (e.g., recovering patients, chronic patients, primary infection, secondary infection, etc.), the antigens also have a known association with a disease parameter and thus allow staging of the disease and/or prediction of therapeutic efficacy. Moreover, as the antigens presented herein are immunodominant antigens, it should be noted that vaccine compositions can be prepared with known or predictable immunogenicity.

[0028] For example, numerous antigens of Burkholderia pseudomallei (those encoded by nucleic acids SEQ ID NO:966 to SEQ ID NO:1150), Borrelia burgdorferi (those encoded by nucleic acids SEQ ID NO:546 to SEQ ID NO:637), Chlamydia muridarum (those encoded by nucleic acids SEQ ID NO:1 to SEQ ID NO:134), Coxiella burnetii (those encoded by nucleic acids SEQ ID NO:678 to SEQ ID NO:713), Francisella tularensis (those encoded by nucleic acids SEQ ID NO:663 to SEQ ID NO:677), Herpes virus 1, Herpes virus 2, and Vaccinia virus (those encoded by nucleic acids SEQ ID NO:638 to SEQ ID NO:654, SEQ ID NO:655 to SEQ ID NO:662, and SEQ ID NO:714 to SEQ ID NO:748, respectively), Mycobacterium tuberculosis (those encoded by nucleic acids SEQ ID NO:749 to SEQ ID NO:965), Plasmodium falciparum (those encoded by nucleic acids SEQ ID NO:135 to SEQ ID NO:445), and Brucella melitensis (those encoded by nucleic acids SEQ ID NO:446 to SEQ ID NO:545) were identified as immunodominant (see also examples and protocol below). With respect to the reading frame for each of the sequences of SEQ ID NO:1 to SEQ ID NO:1150, it should be noted that the first base in the sequences is either the first base of the start codon or the first base in the first codon of the polypeptide that was identified with the methods and compositions provided herein. Most typically, the last three bases denote the stop codon, or the last base of the last codon of the polypeptide that was identified with the methods and compositions provided herein.

[0029] In these examples, each of the antigens was characterized, inter alia, with regard to their individual and relative reactivities for each of the pathogens. Most typically, reactivity was measured as strength of immunogenicity (e.g., such that average binding affinity and/or average quantity of the antibodies produced a predetermined signal intensity (e.g., in the upper half, upper tertile, or even upper quartile)). Furthermore, each of the identified antigens was also characterized by association with at least one parameter. In most cases, the disease parameter was acute infection with the pathogen, and in further cases, the disease parameter was also primary and/or secondary infection. Therefore, it should be especially appreciated that identification of immunodominant antigens will not only allow for identification of statistically meaningful antigens for diagnosis, vaccine development, and treatment, but also allow to develop a stage and disease specific tool to identify candidate molecules to fine-tune diagnosis and/or treatment.

[0030] For example, suitable diagnostic devices especially include those comprising one or more of the immunodominant antigens, fragments, or analogs thereof that are encoded by nucleic acids according to SEQ ID NO:1 to SEQ ID NO:1150. Depending on the particular device format, the device may have only a single immunodominant antigen, fragment, or analog that may be used for detection of binding of antibodies from blood or serum in an automated manner or by visual observation. For example, where a single immunodominant antigen is employed, suitable devices may be in the format of a dipstick or competitive ELISA. On the other hand, where multiple immunodominant antigens are employed, suitable devices may be in the format of an array that can be read in an automated device (e.g., via scanner) or visual manner (e.g., dye-forming colorimetric reaction). Most typically, in such devices, the plurality of antigens is deposited in a spatially addressable manner (e.g., x-y matrix or mixed beads with color association). Moreover, it should be noted that diagnostic devices contemplated herein may be based on numerous well known manners of detection, including ELISA (sandwich or non-sandwich), competitive ELISA, anti-idiotypic antibodies, etc., wherein all known colorimetric and photometric (e.g., fluorescence, luminescence, etc.) or radiometric reactions are deemed suitable for use.

[0031] In most typical devices, a plurality of immunodominant antigens of a single (or multiple) pathogen and/or serotype are deposited onto an addressable solid phase and exposed to blood, serum, plasma or other antibody-containing body fluid. Consequently, so prepared compositions can be employed to identify and/or characterize an immune response of an individual against selected antigens, and optionally assess the kind of immune response (e.g., identification of early, mid, late, or chronic infection), as well as disease progression, efficacy of therapy, etc. Most typically, the plurality of antigens will include at least 2 to 10 antigens, but significantly higher amounts of antigens are also contemplated, including at least 25%, more typically at least 50%, even more typically at least 75%, and most typically at least 90% of the proteome of the pathogen. In further typical aspects of the inventive subject matter, contemplated arrays are most preferably processed in a microfluidic device. For example, an array of antigens in such devices may be printed on a membrane or other material (e.g., nitrocellulose-coated carrier of less than 1 cm² area) that is then placed in a microfluidic device having sample/reagent inlet and outlet ports. Depending on the specific configuration, signals may be acquired using optical methods (e.g. CCD chip, flat bed scanner, etc.), electrical methods (e.g., voltametric or amperometric), or other methods well known in the art. Alternatively, visual detection or detection using a regular flat bed scanner at 1200 dpi resolution and/or fluorescence detection is also deemed suitable.

[0032] In another example, immunodominant antigens according to the inventive subject matter may also be employed to generate an antibody preparation that can be used as a passive vaccination for therapeutic treatment of a disease caused by the above pathogens.

[0033] In still further contemplated aspects, the immunodominant antigens presented herein may also be employed in the manufacture of a vaccine that comprises at least one, and more typically at least two of the immunodominant antigens encoded by nucleic acids according to SEQ ID NO:1 to SEQ ID NO:1150. More preferably, however, contemplated vaccines will include between two and five, or at least six, and even more antigens, of which at least one of the antigens is an immunodominant antigen. Such vaccine compositions may be directed to elicit immunity against single or multiple serotypes and may thus comprise distinct immunodominant antigens, optionally from multiple and distinct serotypes and/or species. Moreover, it should be appreciated that vaccines may be produced that predominantly, or even exclusively, comprise immunodominant antigens of a single parameter. For example, a vaccine may comprise immunodominant antigens that are characteristic for a population that has recovered from an infection with the pathogen without drug intervention. In less preferred aspects, the sequences according to SEQ ID NO:1 to SEQ ID NO:1150 may also be employed as DNA vaccines, or be part of an in vivo expression system that triggers an immune response against the in vivo produced recombinant antigen or fragment thereof.

[0034] With respect to suitable formulations of vaccines, it should be recognized that all known manners of producing such vaccines are deemed appropriate for use herein, and a person of ordinary skill in the art will be readily able to produce such vaccines without undue experimentation (see e.g., “Vaccine Adjuvants and Delivery Systems” by Manmohan Singh; Wiley-Interscience (Jun. 29, 2007), ISBN: 0471739073; or “Vaccine Protocols” (Methods in Molecular Medicine) by Andrew Robinson, Martin P. Cranage, and Michael J. Hudson; Humana Press; 2 edition (Aug. 27, 2003); ISBN: 1588291405). Therefore, suitable vaccines may be formulated as injectable solutions, or suspensions, intranasal formulations, or as oral formulations.

### Examples

[0035] The following examples are provided for Plasmodium falciparum (Pf) and, in part, also for Vaccinia virus as target organism. Substantially similar protocols were adapted to identify immunodominant antigens from Burkholderia pseudomallei, Borrelia burgdorferi, Brucella melitensis, Chlamydia muridarum, Coxiella burnetii, Francisella tulare, Herpes virus 1 and 2, and Mycobacterium tuberculosis.

[0036] Genes/ORFs for Pf were selected in silico and associated (where known) with various specific criteria, including pattern of stage-specific gene or protein expression deduced from genomic, proteomic, or cell biology datasets. PCR primers were then computed to allow for amplification, cloning, and expression as further outlined below. So selected genes/ORFs were then amplified cloned using a high throughput PCR cloning method as previously described by the inventors (Genome Res 14, 2076-2082 (2004)). Efficiencies of the overall process of PCR amplification and cloning were typically about 90% (with higher values for smaller genes and lower values for larger [>2kBp] genes). A subset of the amplified and cloned genes were sequenced to confirm the identity of the target gene and to verify that mutations were not introduced as a result of the amplification and cloning process. On average, 97% sequence identity was noted.

[0037] As compared with other organisms, Pf proteins have often been difficult to express by conventional methodologies in bacterial, yeast or insect expression systems. The inventors therefore evaluated the efficiency of Pf protein expression in an E. coli based cell-free in vitro transcription/translation system (RTS100, commercially available from Roche Biosciences) using 295 different cloned and HIS-tagged Pf ORFs as templates. Quantification of the signal intensities revealed that 94% of signals were ≧4× the controls. A replicate HA-tagged Pf array was produced with two sets of Pf vectors, containing a stop codon either before or after the HA tag. Such tagged recombinant proteins allow facile identification, rough quantification, and purification where desired. Uniformly high expression efficiencies >90% were obtained in all cases. Remarkably, the amount of protein printed per chip is essentially at saturation (data not presented), meaning that differences between any detected antigen reactivities would not be due to differences in the amount of protein spotted.

[0038] PCR amplified and cloned genes/ORFs were expressed in the RTS100 cell-free in vitro transcription/translation system, and printed in duplicate onto microarray chips. These chips were probed with sera from a population of subjects (n=12) who were naturally exposed to malaria in a hyperendemic region of Kenya, a population of subjects (n=10) who were experimentally immunized with radiation attenuated Pf sporozoites and either protected (n=6) or not protected (n=4) against challenge with infectious sporozoites, or a population of malaria-naïve individuals.

[0039] Most notably, sera from malaria exposed individuals and sporozoite immunized subjects reacted against different subsets of expressed proteins. For the naturally exposed group, there were 156 antigens with p values<1e-3 and 77 antigens with p values<1e-7 while for the pre-challenge sera from the irradiated sporozoite immunized groups, there were 17 antigens with p values<1e-3 in the protected group and nine antigens in the unprotected group. The low p values indicate that the signals obtained from the chip are highly significant. Background reactivity from naïve donors was low (data not presented).

[0040] A similar panel was prepared for vaccinia virus with primary and secondary exposure and with a variola as a control group. The results of this series of experiments can be taken from the summary panel of FIG. 1, in which the different populations provided different targets for different types of antibodies. Here, a proteome-wide view is provided for the serological response to DryVax vaccinia and smallpox. Protein microarrays displaying 210 different vaccinia strain WR proteins were probed with sera from individuals before, and 28-30 days after, primary or secondary vaccination with DryVax. All signal intensities have been background subtracted of control spots that lack template DNA, and assigned a color, with the dark end of the spectrum representing the highest signals. At the low end of the scale, a signal intensity of 5000 has been used as the cut-off above which a response was considered positive. Thus all negative responses are light. No significant reactivity was seen with any of the secondary antibodies alone (not shown). The combined IgG, IgM and IgA profiles in primary and secondary DryVax infections include 64 and 49 different antigens (˜29% and ˜22% of the proteome), respectively. Interestingly, most antigens are recognized by fewer than half the vaccinees, and late antigens dominate both primary and secondary responses. Despite variola being a different orthopox species, antibody profiles of individuals infected with smallpox are essentially indistinguishable from DryVax or VIG profiles.

[0041] As can be taken from FIG. 2, the antibody profiles between individuals responding to the DryVax are heterogeneous to a significant degree. Each protein in the proteome was scored seropositive if its signal intensity was >5000 after subtraction of its signal intensity seen with pre-immune serum. As is readily apparent, there were relatively few antigens that were frequently recognized. Indeed, most positive antigens were recognized by fewer than half the vaccinees, reflecting the heterogeneity of individual profiles, and with that reflecting the difficulty in traditional vaccine development to obtain a vaccine that is effective for a large fraction of a population. FIGS. 3A and 3B depict immunodominance profiles of vaccinia antigens in human primary and secondary responses. Average signal intensities from sera 28-30 days post vaccination, with corresponding pre-vaccination signals, were plotted as raw data. Primary responses are shown in panel (A) and secondary responses are in panel (B). In each panel, a cut-off, indicated by the horizontal line, was set by the average of 7 pairs of control spots (expression reactions lacking DNA template) plus 2 standard deviations. The relatively large standard deviations are due to the inter-individual heterogeneity. Pre and post responses to an antigen that are significantly different by 2-tailed, paired t-test are indicated as *** p<0.0005, ** p<0.005, * p<0.05. Others were considered non-significant.

[0042] Characteristic profiles of antigen reactivity were noted for each of the clinically distinct cohorts, indicating that immunoreactive antigens identified in this way may be useful for serodiagnostic tests that are not only relevant with respect to the observed reactivity, but also with respect to a disease parameter (e.g., previous exposure to the pathogen, duration of exposure to the pathogen, chronic infection, at least partial immunity to infection with the pathogen, expected positive outcome upon treatment, etc.). Remarkably, and with regard to the Pf immune panel, the naturally exposed cohort who was protected against clinical disease, but not Pf parasitemia, gave an entirely different immunoreactivity profile compared with the sporozoite-vaccinated cohort that has both anti-disease and anti-parasite immunity. Further, naturally exposed subjects reacted more strongly to a larger number of antigens than the sporozoite immunized subjects, and the subset of sporozoite vaccinees that were protected reacted more strongly to a larger number of antigens than the unprotected group. Still further, the antigen repertoire in the sporozoite immunized and protected group immediately prior to challenge was unchanged after challenge. In contrast, immunized volunteers who developed clinical malaria following experimental challenged (experimentally infected) developed an additional subset of antibodies after challenge; many were similar to the naturally exposed profile but some were unique to the experimentally infected group.

[0043] In addition to the subset of antigens identified on the basis of intensity of response, a subset of antigens which were less immunoreactive but nonetheless frequently recognized was identified. For example, for naturally Pf exposed subjects, 121 antigens were recognized at p<0.05 and frequency≧50% regardless of signal intensity; 20 antigens were recognized by 12/12 subjects (11/20 at signal intensities<4.0). For irradiated sporozoite immunized subjects 82 antigens were recognized pre-challenge at p<0.05 and frequency≧50% by both protected and unprotected subjects; five antigens were recognized by 10/10 subjects (2/5 at signal intensities<4.0). It is therefore contemplated that antigens recognized in high frequency but not necessarily at high magnitude may represent good diagnostic targets.

[0044] To illustrate how immunodominant antigen sets identified in this way can be used for serodiagnostics, a protein microarray containing immunodominant antigens from several infectious agents was fabricated. The antigens were expressed in the cell-free in vitro transcription/translation system, printed onto FAST slides without further purification, and probed with anti-histidine primary antibody followed by alkaline phosphatase conjugated secondary antibody. The slide was developed with alkaline phosphatase substrate and scanned using an ordinary desktop document scanner. The result of this scan is illustrated in FIG. 4 (A) depicting the ‘antigen-loading’ of the array. Immunodominant antigens represented on this ‘diagnostic chip’ are derived from: F. tularensis (Ft), B. pseudomallei (Bp), B. burgdorferi (Bb), M. tuberculosis (TB), P. falciparum (Pf) and vaccinia virus (Vv). The negative control spots (within circles) correspond to in vitro expression reactions without plasmid template. An example of the same slide probed with serum from one of the Kenyan subjects naturally exposed to Pf is shown in FIG. 4 (B). The strongest signals were against the Pf immunodominant antigen set, with weak reactivity toward vaccinia virus and M. tuberculosis antigens. Reactivity against non-Pf antigens could be a consequence of prior exposure to these infectious agents or to cross-reactivity.

[0045] The following exemplary protocol is provided to illustrate the steps and reagents used in the identification of the immunodominant antigens of Pf presented herein. Unless expressly stated, standard laboratory techniques well known to a person of ordinary skill in the art were employed.

### PCR Amplification of Linear Acceptor Vector

[0046] Plasmid pXT7 (10 μg; 3.2 kb, KanR) was linearized with BamHI (0.1 μg/μl DNA/0.1 mg/ml BSA/0.2 units/μl BamHI; 37° C. for 4 hr; additional BamHI was added to 0.4 units/μl at 37° C. overnight). The digest was purified using a PCR purification kit (Qiagen, Valencia, Calif.), quantified by fluorometry using Picogreen (Molecular Probes, Carlsbad, Calif.) according to the manufacturer's instructions, and verified by agarose gel electrophoresis (1 μg). One ng of this material was used to generate the linear acceptor vector in a 50-μl PCR using 0.5 μM each of primers 5′-CTACCCATACGATGTTCCGGATTAC and 5′-CTCGAGCATATGCTTGTCGTCGTCG, and 0.02 units/μl Taq DNA polymerase (Fisher Scientific, buffer A)/0.1 mg/ml gelatin (Porcine, Bloom 300; Sigma, G-1890)/0.2 mM each dNTP with the following conditions: initial denaturation of 95° C. for 5 min; 30 cycles of 95° C. for 0.5 min, 50° C. for 0.5 min, and 72° C. for 3.5 min; and a final extension of 72° C. for 10 min.

### PCR Amplification of ORF Insert

[0047] A total of 1-10 ng of Pf genomic DNA (3D7 strain) was used as template in a 50-μl PCR. The following primers were used (0.5 μM each): 5′-CATATCGACGACGACGACAAGCATATGCTCGAG (20-mer ORF specific at the 5′ end) and 5′-ATCTTAAGCGTAATCCGGAACATCGTATGGGTA (20-mer ORF specific at the 3′ end). The Pf genome is the most A+T rich genome sequenced to date with an overall (A+T) composition of 80.6%, rising to ˜90% in introns and intergenic regions. Consequently, PCR amplification of Pf genes using genomic DNA template was problematic. Initially, PCR was carried out using regular Taq DNA polymerase: 0.02 units/μl TaqDNA polymerase (buffer A, Fisher Scientific)/0.1 mg/ml gelatin (Bloom 300, Porcine; G-1890, Sigma)/0.2 mM each dNTP. Conditions were as follows: initial denaturation of 95° C. for 5 min; 30 cycles of 20 sec at 95° C., 30 sec at 50° C., and 60 sec/kb at 72° C. (1-3 min on average, based on ORF size); and a final extension of 72° C. for 10 min. PCR products that were more difficult to produce were reamplified by using a 30 sec annealing time at 45° C. or 40° C., instead of 30 sec at 50° C. Also, the extension temperature was decreased from 65-72° C. to 50° C. Subsequently PCR products were obtained using a Taq polymerase with improved proof-reading characteristics (Triplemaster from Eppendorf), increasing the efficiency of the PCR step to 87%: 0.04 units/μl Triple Master PCR system (high-fidelity buffer, Eppendorf)/0.4 mM each dNTP (Eppendorf). Conditions were as follows: initial denaturation of 95° C. for 3 min; 35 cycles of 15 sec at 95° C., 30 sec at 40° C., and 60 sec/kb at 50° C. (1-3 min on average, based on ORF size); and a final extension of 50° C. for 10 min., PCR products that were difficult were reamplified using 50 ng genomic DNA. The PCR product was visualized by agarose gel electrophoresis (3 μl). For quantification, the product was purified (PCR purification kit, Qiagen) and quantified by fluorometry. Since the reliability of producing the desired PCR product decreases as the length of the genomic DNA fragment increases, exons longer than 3,000 by were divided into multiple overlapping sections, with 50 nucleotide overlaps.

### In Vivo Recombination Cloning

[0048] Competent cells were prepared in our laboratory by growing DH5a cells at 18° C. in 500 ml of SOB (super optimal broth) medium (2% tryptone/0.5% yeast extract/10 mM NaCl/2.5 mM KCl/20 mM MgSO₄) to an OD of 0.5-0.7. The cells were washed and suspended in 10 ml of pre-chilled PCKMS buffer (10 mM Pipes/15 mM CaCl₂/250 mM KCl/55 mM MnCl₂/5% sucrose, pH 6.7) on ice, and 735 μl of DMSO was added dropwise with constant swirling. The competent cells were frozen on dry ice-ethanol in 100-μl aliquots and stored at −80° C. Each transformation consisted of the following: 10 μl of competent DH5α and 10 μl of DNA mixture (40 ng of PCR-generated linear vector/10 ng of PCR-generated ORF fragment; molar ratio, 1:1; vector, 1-kb ORF fragment). For transformation, the purification of PCR product was unnecessary. The mixture was incubated on ice for 45 min, heat shocked at 42° C. for 1 min, and chilled on ice for 1 min; mixed with 250 μl of SOC (super optimal catabolizer) medium (2% tryptone/0.55% yeast extract/10 mM NaCl/10 mM KCl/10 mM MgCl₂/10 mM MgSO₄/20 mM glucose); incubated at 37° C. for 1 hr; diluted into 3 ml of LB medium supplemented with 50 μg of kanamycin per ml (LB Kan 50); and incubated with shaking overnight. The plasmid was isolated and purified from this culture, without colony selection.

### In Vitro Protein Expression

[0049] Plasmid templates used for in vitro transcription/translation were prepared by using QIAprep Spin Miniprep kits (Qiagen), including the “optional” step, which contains protein denaturants to deplete RNase activity. In vitro transcription/translation reactions (RTS 100 Escherichia coli HY kits; Roche) were set up in 25 μl PCR 12-well strip tubes and incubated for 5 h at 30° C., according to the manufacturer's instructions.

### Immuno-Dot Blots

[0050] To assess relative efficiency of protein expression, 0.3 μl of whole rapid-translation system (RTS) reactions were spotted manually onto nitrocellulose and allowed to air dry before blocking in 5% nonfat milk powder in TBS containing 0.05% Tween 20. Blots were probed with hyperimmune sera diluted to 1:1,000 in blocking buffer with or without 10% E. coli lysate. Routinely, dot blots were stained with both mouse anti-poly-HIS mAb (clone, HIS-1; H-1029, Sigma) and rat anti-hemagglutinin (HA) mAb (clone, 3F10; 1 867 423, Roche), followed by alkaline phosphatase-conjugated goat anti-mouse IgG (H+L) (BioRad) or goat anti-rat IgG (H+L) (Jackson ImmunoResearch) secondary Abs, respectively. Bound human Abs were visualized with nitroblue tetrazolium (nitro-BT) developer to confirm the presence of recombinant protein.

### Microarray Chip Printing

[0051] For microarrays, 10 μl of 0.125% Tween 20 was mixed with 15 μl of RTS reaction (to a final concentration of 0.05% Tween 20), and 15-μl volumes were transferred to 384-well plates. The plates were centrifuged at 1,600×g to pellet any precipitate, and supernatant was printed without further purification onto nitrocellulose-coated FAST glass slides (Schleicher & Schuell) by using an OmniGrid 100 microarray printer (Genomic Solutions, Ann Arbor, Mich.). All ORFs were spotted in duplicate to enable statistical analysis of the data. Data values reported herein represent the average of pairs. In addition, each chip contained an area printed with controls consisting of RTS reaction using no DNA.

### Protein Microarray Screening

[0052] Microarray chips were probed with human serum that was first pre-absorbed against E. coli-lysate to block anti-E. coli antibodies as described previously. In the absence of pre-absorbing, high titers of anti-E. coli antibodies could mask any antigen-specific responses when using whole RTS reactions on dot blots and arrays. For all staining, slides were first blocked for 30 min in protein array-blocking buffer (Schleicher & Schuell) and then incubated in serum for 2 hr, at room temperature. Antibodies were visualized with Cy3-conjugated secondary Abs (biotinylated secondary followed by Streptavidin PBXL-3, for HIS-probing) (Jackson ImmunoResearch) and scanned in a ScanArray 4000 laser confocal scanner (GSI Lumonics, Billerica, Mass.). Fluorescence intensities were quantified by using QuantArray software (GSI Lumonics). Other studies in our affiliated University laboratory have established that the results from scanned microarray chips can be represented numerically and that signal intensity is proportional to antibody titer (data not shown).

### ELISA

[0053] To validate the immunoreactivity detected by the protein microarrays, sera was analyzed by ELISA against a panel of known and well-characterized Pf pre-erythrocytic stage antigens (PfCSP, PfLSA1, and PfExp1) and erythrocytic stage antigens (PfAMA1, PfMSP1), as previously described. The mean OD readings of quadruplicate assays were recorded, and results reported as the OD value at each serum dilution and as endpoint dilution (defined as greater than the mean+/−3 standard deviation of negative control sera).

### Indirect Fluorescent Antibody Test (IFAT)

[0054] Antibody recognition of Pf (NF54/3D7) sporozoite or blood stage parasites was evaluated by IFAT as described previously. Reactivity was scored as positive when the immunofluorescence pattern of the parasite was recognized and when the fluorescence was above the background of the negative controls. IFAT results were expressed as the endpoint serum dilution at which positive fluorescence was detected.

### Malaria-Exposed Study Populations

[0055] Individuals were selected for study on the basis of malaria history. Studies were conducted in compliance with all applicable Federal regulations governing the protection of human subjects. The irradiated sporozoite study protocol was approved by the Naval Medical Research Center Committee for the Protection of Human Subjects, the Office of the Special Assistant for Human Subject Protections at the Naval Bureau of Medicine and Surgery, and the Human Subjects Research Review Board of the Army Surgeon General. The Kenyan samples were collected under a study protocol approved by the Naval Medical Research Institute's Committee for the Protection of Human Subjects, the Walter Reed Army Institute of Research Human Use Committee, and the Kenya Medical Research Institute/National Ethical Review Committee. Written informed consent was obtained from all subjects.

### Sporozoite Immunized Volunteers

[0056] Caucasian volunteers (n=10) were experimentally immunized with radiation-attenuated Pf sporozoites as previously described (The Journal of Infectious Diseases (2002), Vol: 185, p1155-64). Subjects were challenged by the bites of 5 infected Anopheline mosquitoes, and evaluated for the development of clinical malaria. Protection was defined as complete absence of blood-stage parasitemia (sterile protection). Six of the 10 immunized volunteers were protected against sporozoite challenge and were classified as sporozoite-immune; four were not protected and were classified as sporozoite-exposed but non-immune.

[0057] Serum samples were collected from each volunteer prior to immunization (pre-bleed), at the completion of the immunization series and immediately prior to challenge (pre-challenge), and following challenge (post-challenge). Pre- and post-challenge IFAT titers against Pf sporozoites were 613.3 (mean; range 160-1280) and 170 (mean; range 40-320) for protected and unprotected volunteers, respectively.

### Individuals Naturally Exposed to Malaria

[0058] Kenyan subjects (n=12) were residents of the Asembo Bay area of Kenya. In this area, the year round prevalence of Pf infection amongst children 6 months to 6 years of age has been documented as 94.4-97.8%. Enrolled subjects reported an average of 2.1 episodes of clinical malaria within the previous year. The study cohort derives from a subset of 185 volunteers previously enrolled in an immunoepidemiology study and selected for the current study on the basis of sex, age, malaria history and recognition of native Pf sporozoites and parasitized erythrocytes, by IFAT. Pf sporozoite and blood-stage IFAT titers for the pool of hyperimmune sera from these 185 individuals were 5,120 and 81,920, respectively.

### Analysis of Individual Array Measurements

[0059] As a first step in determining significantly bound antigens for each serum/array using statistical tests, the inventors defined the true negative control signal to compare each antigen with the mean signal of all spotted controls on the array. Since comparisons needed to be carried across arrays, the inventors transformed the raw signals using the vsn (asinh transformation, similar to log for higher intensities) method, shown to effectively calibrate array measurements through shifting and scaling and also to stabilize the variance in DNA microarray and 2D difference gel electrophoresis data analyses. Because standard deviation (SD) estimates can be unreliable (artificially high or low) when there is low replication of measurements, and since each antigen was spotted only twice per array, the inventors applied the Bayes-regularization technique described in Baldi and Long (Bioinformatics (2001), 17, 509-519; Baldi, P. and Hatfield, G. W. (2002) DNA Microarrays and Gene Expression: From Experiments to Data Analysis and Modeling, Cambridge University Press, Cambridge, UK; and Bioinformatics (2006), Vol. 22, No. 14; p:1760-1766, all incorporated by reference herein). This technique derives more robust estimates (as shown in the context of DNA microarray data analysis) of the SD of each antigen as a weighted combination of the sample SD and the pooled SD of neighboring antigens with similar signal intensity. Using these new regularized estimates for the standard deviation, we conducted a series of Bayes-regularized one-sided t-tests on antigens with higher mean signal than the defined control to reliably estimate the signal changes between each antigen and control, and computed the corresponding p-values.

### Analysis of Groups of Array Measurements

[0060] In addition to determining the positive antigens recognized by each of the individual sera, the inventors averaged replicated spot measurements per sera and pooled the responses for each cohort/group, to identify the positive antigens while taking into account the biological variation within the sera in each group. Since the measurements were obtained from different arrays, the inventors performed a calibration and variance stabilization of the measurements using the vsn method (Bioinformatics 18 Suppl 1, S96-104 (2002) prior to the pooling of measurements. As for the analysis of individual sera, the inventors defined the true negative control using the mean control signal spotted on the arrays. One-sided Bayes-regularized t-tests were performed within each group to compare and rank the antigens with a higher mean signal than the control. For the individual and cohort/group analysis, using the average SD of 5-30 neighboring antigens along with a weight of 5 “pseudocounts” for computing the Bayes-regularized SD was observed to achieve a moderate regularization effect. Given the large number of hypotheses being tested, the inventors applied the method in Storey and Allison et. al. to the set of p-values to estimate the experiment-wide false discovery rates (FDR). For the individual and cohort analyses of the 43 arrays, a p-value cutoff of 0.05 corresponded to an FDR level of 0.06-0.065. With the additional criteria applied for determining a positive response as described below, the inventors expect the FDR to be lower.

### Analysis of Frequency of Response

[0061] In addition to analyzing the intensity of response (as described above), the inventors also assessed the frequency of response for each antigen as the number of individuals within a given cohort for which that antigen was positive on the basis of normalized signal intensity relative to control.

### Criteria of Positivity (Immunodominance)

[0062] Final classification of antigen reactivity was made taking into account both magnitude of response (signal intensity) and frequency of recognition. The responses by a particular cohort of donors were considered positive overall if all of the following criteria were met: (1) normalized signal intensity >4.0 (ratio of signal intensity of test relative to control >4.0); (2) response was statistically significant (p<0.05) compared with control signal intensity; and (3) frequency of positive responses within a particular cohort ≧2.0.

[0063] Thus, specific embodiments and applications of immunodominant compositions and methods have been disclosed. It should be apparent, however, to those skilled in the art that many more modifications besides those already described are possible without departing from the inventive concepts herein. The inventive subject matter, therefore, is not to be restricted except in the spirit of the appended claims. Moreover, in interpreting both the specification and the claims, all terms should be interpreted in the broadest possible manner consistent with the context. In particular, the terms “comprises” and “comprising” should be interpreted as referring to elements, components, or steps in a non-exclusive manner, indicating that the referenced elements, components, or steps may be present, or utilized, or combined with other elements, components, or steps that are not expressly referenced. Furthermore, where a definition or use of a term in a reference, which is incorporated by reference herein is inconsistent or contrary to the definition of that term provided herein, the definition of that term provided herein applies and the definition of that term in the reference does not apply.

### Sequence Listing

[0064] The Sequence Listing providing sequences with the SEQ ID NO:1 to SEQ ID NO:1150 is submitted as a single file on a single compact disc in computer readable format (CRF; three copies of the disc were submitted together with the original CRF disc), wherein the single file is entitled “101519.0001PCT_Sequence_Listing_ST25.txt”, which was created Oct. 25, 2007, which has a size of 1908 kb, and which is incorporated by reference herein. Therefore, four identical discs, each containing a single sequence listing file with the file name “101519.0001PCT_Sequence_Listing_ST25.txt” have been submitted.

What is claimed is:

1. An antigen composition comprising:
a plurality of antigens of a pathogenic organism associated with a carrier, wherein at least two of the antigens are immunodominant antigens;
wherein the at least two of the antigens have quantified and known relative reactivities with respect to sera of a population infected with the organism;
wherein the at least two of the antigens have a known association with a disease parameter; and
wherein the plurality of antigens are encoded by nucleic acids selected from the group consisting of SEQ ID NO:1 to SEQ ID NO:1150, or fragments thereof.

2. The antigen composition of claim 1 wherein the pathogenic organism is Burkholderia pseudomallei, and wherein the plurality of antigens are encoded by nucleic acids selected from the group consisting of SEQ ID NO:966 to SEQ ID NO:1150.

3. The antigen composition of claim 1 wherein the pathogenic organism is Borrelia burgdorferi, and wherein the plurality of antigens are encoded by nucleic acids selected from the group consisting of SEQ ID NO:546 to SEQ ID NO:637.

4. The antigen composition of claim 1 wherein the pathogenic organism is Chlamydia muridarum, and wherein the plurality of antigens are selected from the group consisting of SEQ ID NO:1 to SEQ ID NO:134.

5. The antigen composition of claim 1 wherein the pathogenic organism is Coxiella burnetii, and wherein the plurality of antigens are encoded by nucleic acids selected from the group consisting of SEQ ID NO:678 to SEQ ID NO:713.

6. The antigen composition of claim 1 wherein the pathogenic organism is Francisella tularensis, and wherein the plurality of antigens are encoded by nucleic acids selected from the group consisting of SEQ ID NO:663 to SEQ ID NO:677.

7. The antigen composition of claim 1 wherein the pathogenic organism is Herpes virus 1, Herpes virus 2, or Vaccinia virus, wherein the plurality of antigens are encoded by nucleic acids selected from the group consisting of SEQ ID NO:638 to SEQ ID NO:654, wherein the plurality of antigens are encoded by nucleic acids selected from the group consisting of SEQ ID NO:655 to SEQ ID NO:662, and wherein the plurality of antigens are encoded by nucleic acids selected from the group consisting of SEQ ID NO:714 to SEQ ID NO:748, respectively.

8. The antigen composition of claim 1 wherein the pathogenic organism is Mycobacterium tuberculosis, and wherein the plurality of antigens are encoded by nucleic acids selected from the group consisting of SEQ ID NO:749 to SEQ ID NO:965.

9. The antigen composition of claim 1 wherein the pathogenic organism is Plasmodium falciparum, and wherein the plurality of antigens are encoded by nucleic acids selected from the group consisting of SEQ ID NO:135 to SEQ ID NO:445.

10. The antigen composition of claim 1 wherein the pathogenic organism is Brucella melitensis, and wherein the plurality of antigens are encoded by nucleic acids selected from the group consisting of SEQ ID NO:446 to SEQ ID NO:545.

11. The antigen composition of claim 1 wherein the known reactivities are characterized by strength of immunogenicity.

12. The antigen composition of claim 1 wherein the known reactivities are characterized by the time course of the infection.

13. The antigen composition of claim 1 wherein the parameter is selected from the group consisting of a previous exposure to the pathogen, acute infection, duration of exposure to the pathogen, chronic infection, at least partial immunity to infection with the pathogen, and expected positive outcome upon treatment.

14. The antigen composition of claim 1 wherein the at least two of the antigens are present in at least 40% of a population exposed to the at least two antigens, and optionally wherein at least one of an average binding affinity and an average quantity of antibodies produced in a patient against the at least two antigens is in an upper tertile of binding affinity and quantity of antibodies produced in the patient.

15. The antigen composition of claim 1 wherein the at least two of the antigens have a p-value of less than 0.05.

16. The antigen composition of claim 1 wherein the carrier is a pharmaceutically acceptable carrier, and wherein the composition is formulated as a vaccine.

17. The antigen composition of claim 16 wherein the vaccine comprises at least four antigens.

18. The antigen composition of claim 16 wherein the vaccine comprises antigens from at least two distinct pathogens.

19. The antigen composition of claim 16 wherein the antigens or fragments thereof are recombinant.

20. The antigen composition of claim 16 wherein the antigens or fragments thereof are at least partially purified.

21. The antigen composition of claim 1 wherein the carrier is a solid carrier, and wherein the plurality of antigens is disposed on the carrier in an array.

22. The antigen composition of claim 21 wherein the antigens are from at least two distinct pathogens.

23. The antigen composition of claim 21 wherein each of the antigens are present in a purity of greater than 60%.

24. The antigen composition of claim 21 wherein the antigens or fragments thereof are recombinant.

25. The antigen composition of claim 21 wherein the antigens or fragments thereof are at least partially purified.

The application's sequence listing, which the Patent Office published only in electronic form, follows.

SEQUENCE LISTING (1150 sequences)

SEQ ID NO: 1 - DNA, 1002 bp, Chlamydia Muridarum
atgacaagacttcctctactcaaacgacctcgaagaaatcggaaaagtgctgctattcgatctatgattcgagaaactaatatggtttcaagtgatctaatttggcctatttttcttaaagaaggttcaggaattcgagaagaaatacccagtatgcctggagtatacagatggagtttagataccatatctagagaattagaaagactctgtcttatagggctaaaagcggttatccttttccctgttatagaggatcagaaaaaagatcaattcggagcatatgcatcgcatccgtataacattgtttgtagaggaattcaggaaatcaaaaaatcttttccccaactgtgtgtgattagtgatatagctttagatccttttacgactagtggtcacgatggcattttttacaacaatgaagtgttaaatgacgaaagcgttcgcgtatatggagatatcgcaacattgcatgcagaaatgggagcggatattgttgctccaagcgatatgatggatgggagagttcggcatattcgagaaaaaatggatcagatgggctttgttaatacaggaattctctcttatagcgcaaagtatgcatcttacttgtatggtccgtttagagatgctctttcttcgcatcctcaatctggggataaacggcaatatcaaatggatcctgccaatgttcgagaagctttgcttgaatgccggctagatgaagaggagggagcagatatggtaatgataaagcctgctgggttttatttagatgttatcatgaaagctcaagaatgtacgcatcttccagtagttgcctatcaagtcagtggagaatattctatgattatggccgccagtctgcatggatggttaagtaaagaaggagctatctcggagtctttgttagcaattaaacgagctggggctacggctataattagctatgcaactccatgggttttagaatggctagctagagacgctcttcctttttaa

SEQ ID NO: 2 - DNA, 237 bp, Chlamydia Muridarum
atgaaagagtttttagcgtacattgtaaaaaatcttgttgataggccggaggaagtgcatctaaaagaggtgcagggaacgaacacgattatctacgaattgactgttgctaagggagatatcggtaaaatcatcgggaaggaaggacgaacgatcaaagcaattcgtaccttgcttgtctccgtagcaagccgagataatgtgaaggtcagtctagaaattatggaagagcgataa

SEQ ID NO: 3 - DNA, 2475 bp, Chlamydia Muridarum
atgggtatacgcttagttgttgataaagggcccttgtctggaaccgtccttattttggaaaacgggacgagttggtctcttggaagtgacggcaaagcaagcgatattttattgcaagatgaaaagcttgctcctgctcaagttcgcgttactttaaaagatggcgaatattacctagaaaatttagatgtttctcggccagtcctggttaatggagtcgctattacagctccgaccctattaaaagagggaattcccttcgtaatgggaagctgcgagtggtcattttttaaaggagaagaagtagaaggagatatcgagttatcgttccagacagaagaaaacggcggagaagcggaacagcaagcgcaaggatcttctcaagttgaatcaaaaacgaacacaggacctcgaggccattcttcaggagcttcgtctgcagacggagtttcagcttctgcagcagaaaaagaacaaaagttagcggaatcctttttagcttctgttgagaaggggacaggagctgtacaagaagactctaatagagaagtctctttgcaggaaaatcaacaagctgctcccgcaaaagagaaaatgaatctcgagcttccttcagtaaatcaagaacaaccaaaacaagctactccatcaggcagtggtgaactaactcaatctcaaaacgtgagtatggaagaaaacagaccatcacccgatcaaaatcagcagcctcagctttcttctgattcggaaccagatgctaaaggtgctgagaatcaagagcaactttcacaatcttcttctccatctcaggaaaatccgaaacaatcagaagattccagtagcgctacaaaagaaagtgttgcaactccggaagagaaactcccagaggcggaaggagacaattctgcatcgagcgaggaagaaaagattgaagaagaatcttccgaaggagaatctaatgaggagcaaacggtagaagctcctgcagaagaagagaaaaaagaagaaaaaggagaggttctagcgcctttcaatgtgcaggatcttttccgatttgatcaaggtattttccctgcagagatagaagatcttgcacaaaaacaagttgctgtagatctcactcagccttctcggtttttattaaaagtacttgctggggctaatattggtgctgagtttcatttggatagcgggagaagctatatagtcggaagtgatcctcaggttgctgatattgttctaagtgatatgagcatttctcgccaacatgcgaaaattattattggcaatgatagctctgttctcattgaagatttaggcagtaagaatggcgtgattgttgaaggccggaagatagagcatcagtctactctttccgccaaccaagttgttgctctaggaacaacattgttcttacttgttgattacgcagctccttctgacacagtaatggctaccatttcttctgaagattacgggttgtttggtcgtccgcaatctccagaagaaattgctgcaagaaaagaggaagaggaagaagagaaaagaaagcgggcaacattaccaacaggcgcttttattttgaccctatttgtaggaggtctagcactcctttttggaataggaacagcttctctattccatacgaaagaagtagtttctatcgatcaagtagatttaattcatgatattgagcatgtgattcaacagtttccaactgtacggtttacctttaataagaataacgggcagttattcttaattggtcacgtaaaaaatagcatcgataagagtgaattgctttataaggtagatgccttgccttttgtcaaatctgttgatgataacgtgattgatgatgaggctgtatggcaagaaatgaatattttgctctccaagaagcctgagtttaaagggatcagcatgctgtctccagagccaggagtttttgttatcagtgggtacttgaagacagaagagcaagcggcatgtctgtcagattacttaaacttacactttaattatctttcgctattggacaataaggttgttatagaaacgcaggtaatcaaagcgcttgcagggcatttgatacagtctggtttcgcaaacgtccatgttgcttttaccaatggtgaagctgttttgactgggtacattaacaataaagatgcggataagttccgagcagttgtgcaagagcttcaagacattgctgggattcgcgtggtaaagaattttgttgttttgttgcctgcagaagagggtgttattgatctgaatatgcggtatccagggcgttatcgggtaacaggtttttctaaatgcggagatattagcatcaatgttgtagtgaatgggcgtattttgacccgaggcgatgttttagatggaatgacagtaacaagcattcaaccacacagtatctttttagaacgcgaagggttgaaatataaaattgagtacaataaatag

SEQ ID NO: 4 - DNA, 1329 bp, Chlamydia muridarum
atgaaagagctaacgaccgagtttgatacgctcatgactgaattgccagaagttcaattgacggcagttgttgggcgtattatcgaagttgtcgggatgttaatcaaagctgtcgttccggatgttcgggtgggcgaagtttgcctggtgaaacgtcatggaatggagcctttggtaacagaggttgtcgggtttacgcagaactttgtatttctctctcctttaggagagttatctggagtgagtccttcttctgaagtgatcgccacgggattgcctttgcacattcgagcaggggcaggacttttaggccgtgtattgaatggtcttggagaacctattgatatagagaccaaaggacctttggagaatgtcgattccatttatcccatttttaaagctccaccagatcctttgcatcgagaaaaattgcgtacgattctatctacaggagtgcgttgtatagatggaatgcttactgttgccaaaggacaaagaatcgggatttttgcgggagcaggggtcggaaaatcttctttgttaggcatgattgctcgtaacgcagaagaagccgatattaacgtgattgcgttaattggagagcggggacgagaagttcgggagtttatagaaaatgaccttggtgaagaaggaatgaaacgttccgtcattgtggtatctacttccgatcaatcttctcagcttcgattgaacgctgcttatgtgggaacagctatagcagaatattttagggaccagggtaagacagttgtgcttatgatggattctgtgacccggtttgctcgagctttacgggaagtagggctcgcagctggagagcctcctgctcgtgctgggtatactccttccgtattttcaacattgcccaaattattggaaagagcgggagcttcggagaaagggactatcacggcattttataccgtgttagttgctggggatgatatgaatgagccggtggctgatgaggtgaagtctattttggatgggcatatcgtgctttccaacgcgttagctcaagcttatcattatcctgcgattgatgtgctggcttctattagccgattattgactgcaattgttcctgaagaacaacgtcgaattattggtcgtgctagggaagtcttagcgaaatataaagcgaacgagatgttgattcgtattggggaatatcgtcgagggtctgatcgtgaggtagatttcgcgattgaccatattgataaattgaatcgtttcctcaagcaagatattcatgaaaaaacaaattatgaggaagctgctcagcagttgagagcaatattccggtaa

SEQ ID NO: 5 - DNA, 852 bp, Chlamydia muridarum
atggaagtaaataaaacgacagaatctttgtttagtgcaaaggttgagcataatcatgcacaggcagaatctcatgagccaagagatcaaagagatgttaaggtattttctttaggaggaaaatcttcctctaaacaagaaaaattagaccatggatcaggaagaacctcttcgcgtcatgaaacttcaagaagttctaaggaaggtagtattgaagataagtctgcagaagtttcttctcgagaagaagaggaggaaaacagagatggattcttgtctggaggtaatttaactgcaggagtagcttttactgatacacctatggctgtagctagcgaagtgatgatagagaccaatgctgtgaccatgagtcaaattgatttgcaatgggtagaacagcttgttttatctacagtagaatccttgttagttgctgatgtagatggaaagcaattagtagagattgttttagataataatagtacagtgccagaggctttctgcggagctaatttaaccctagtgcaaacaggggaggatgtggctgttactttctcaaatttcgtagatcaggatcaggttgcagaagctatgcaactggttcaacagaatcccgagcaattaacttctttagttgagtctttgaagtctcgtcagttaaatttaacagagttagttgtaggtaacgtagccgttagcctacctgttcttgaaaaagtagaaactccattacacatgattgcagcgactattcgtcatcatgatcaggaaggagaccaagaaggtgaaggacgtcaagaacaacatcaaggtcgccagcaagagaagaaattagaagaagctcagatataa

SEQ ID NO: 6 - DNA, 1122 bp, Chlamydia muridarum
atggcagttgcagcagagcctagtagtaattggttgaaagctagagacgagttactaagttctttgcaaaaacaggacgaagggagtttctcccttcctgttttcccaaagcaggagtgtgagcagaaactgaaagagaaattccacttagaagaggtggaactctcttttgagtcgcaagggctcttgtctgctgcacctgctgtgcaggaatacggagagcatgttttgcttcagccatttttggcaaatccctttgaatcaggagagttttatattgtttcttcagaagaagatttgcaagcattgatagggaccatttttaatgatagttccctagcttcttacttctatgaaaaagatcggttattggggttccattactattttgttgccgagatctgcaagcttttgcaagaggtctcttggatcccttccatggcagtgaaggtaacaggggatgttgcattttctgctcgtgctttagaaggggactatcatgttgtgcaagtcacttgtcgtttagatagctcttatgtgcgtttttctgttttggttcctgacacaacagcccagagtgtctataaattcttagaagagaagaatcagactttcgatatccaaaaaatcgatatgcaaactcctgttactctctctgtagaagtagggttttgtcagatctcagaagaagattggcaccaagttgttcccggcagttttattttgttagatgcttgtttgtatgatccagatacgggcgatgcgggagctttcttatcgattcagcgtactcggttttttggtggacggtttttagacaagcagtcgggagattttaaaattactggattgcaagaacttcagccagaagatgctcctgaggaacacagcgaaggaggcccagcagctcctttaccatccgcgacaaaaattgttgcagaggttgctcgctatactctttctgttggagaatttttgaagctagaacccggaagcattttgcattttgaaggcatgcatcctactttaggggtagatatcattctgaacggggctaaagtgggtcgtggcaatattattgctctgcaagatgtgctaggaattcgagttttagaagtataa

SEQ ID NO: 7 - DNA, 2019 bp, Chlamydia muridarum
ttgaacaagaattctcttacttgtcaggatttgaaagaagttggctataccgtcaattttgaagacatttctattttggaattgctgcagtttgtaagtaagatttccggaacaaatttcgtttttgatagcaatgacttgcaattcaatgtaacgatagtttctcacgatcctacttcggtggatgatttagcaacgattctattgcaagttttgaagatgcatgacttgaaagtcatggagcaggggaataacgtattaatttatcgcaatccgaagctttcacaactgtcaacagtagtgactgatggctctgccaaagatactagtgaagcagtagtggttacacgagtatttcgtttgtatagcgtaagtccttctgctgcggtagaaattattcagccgttactttcccatgatgcgattattagtgcttccgagtccactagacatattatcgtttcggatatagcaggaaatatcgaaaaagttcgagagttgatacaggcattagatagccctggagcgtctattgatatgtctgagtatgaagtgcagtttgctaatcctgctgcattagttagctattgtcaggatgtccttggagcaatgacggaagaagagggcttccaaatttttattcagccagggacgaataaaatttttgttatttcatctccaagattaacaacgaaagcgatccaattattacaatctttagatatcccagaaatggcgcatacattggatgatgtgacgagccctgcgtctgctttgggtagctctggatccgctaatcctaagagcatgcgctttttcatgtataaattgaaatatcaggatggatcagctattgctcaagcgatccaggatattgggtataacctttatgtgacaacggcgatggatgaagatttcatcaacacgttgaacacgattcaatggttgcctattaacaattctatcgttgtgatcggaaatcaggctaatgtggataaggttgttagtctgttgaacggattagatcttcctccaaaacaagtgtatattgaagttctcattttagagacgagtttagaaaaatcttgggactttggggtgcaatgggcagctcttggagatgaacaaggaaaagtagcttatgcttctggtttgttgagtaacacaggagtggtggatcctttgcgtaatcagactcctcccgttgctccaaacccagggaatatctcgttgccaactccaggtcaattagctggcatcagtgatatgatgtatggatcttctgcatttggattaggaattattgggaatgttctcagtcataatgggaagtcttatctaacgttaggaggattactaagtgccctagaccaagatggtgatacaacagtggtgcttaatccaagaattatggcgcaagatacgcagcaagcgtccttctttgtaggccagacaattcctttccaaacaacgagtacggttatccaggaaactggctctgttacacaaaatattgaatacgaagatatcggagtgaatctggtcgtaacatcaactattgctcctaataatgtcgttactttgcagatcgagcaaacgatttctgaattgcattcagcgcaaggagttctcactcctgtaacggataaaacgtttgctgctacaagattacaagttcctgacggatgtttccttgttatgagtgggcatattcgagataaactcacaaaaattgtttctggggtgccattactcagttctcttcctctaatcaaaggactctttagccgaacaatcgatcagcgccaaaagcgcaatattatgattttcattaagccaaaagtcattagtagctttgaggaaggaacagtcttatccaactcggaaggatatcgttataattgggaaagtgaaagaggatctttagaagttgctcctcgtcatgctcccgaatgtcagaatgctcctaaggttcagacagaaagtgattttaaaatgctagaaatagaagcagaataa

SEQ ID NO: 8 - DNA, 534 bp, Chlamydia muridarum
atggctttcggtatgaacccctcagaagagtcttctgctctttgttataactgccagcaaccagcaacaatttgttttacagaaatttctgaaaacatcacttcgcgatgttatgtatgcaataactgcccatacccttctcgatattatgatcgagaaacggtcctcgcttctcctacaaatgaaaccctaattttagaatgtggcaattgtaaaactaaatggtgtatccgcgacacggatgagattttattaggatgcgctctatgctatagaactttcaaatctcttattttatccaggctcttacgctatcaagccatttcatcctatactgcagacaaaaccaataacttccatatcgggcgttctttaggaaatatagaaaaacctactgttaatcctgctatgcgtctgatcgctttacatgaggccttacaagagactctacgacgagaagattatgagcaagctgcagaaattcgtgatcaaattaatcagctaaaaaatcagaatacaaccgatgctccctaa

SEQ ID NO: 9 - DNA, 849 bp, Chlamydia muridarum
atgagcgacttctccatggaaacattaaagagtttgagacagcgaacaggtgtaggcctgacaaaatgtaaagaagcccttgaacatgcaaagggcaacttagaagatgctgttgtttacttacgaaaacttggacttgcctctgctggtaagaaagagcaccgagaaacgaaagaaggtgtcattgctgcgtcggttgatgagcatggggcagctatcgtcgaagtgaatgttgagacggactttgttgctaacaatagcgttttccgaacgtttgttacaggtttattatccgacatcctcaacaacaaactgagtgatgtggatgctttagctcaagtaacgtcctctcaagagccttctttatctgtagaagagctcaaagctgtaacgatgcaaacagtcggagagaatattcgtataagccgcgcgctatatacacctgttaactctaatcagagtgtaggaatctattctcatggaaatgggaaagccgttgccctggtctttctttccggatctgacaaacaagaagcgttagcaaaagatattgctatgcatattgttgcaagtcagccacagttcttaagtaaagaaagcgttcctcaagaagttttagagagagaaagagaagtattttcttcccaactatcaggaaaaccccaggaagtaattgagaaaattactacagggaaatttaaggcctttttccaagagacttgtttattagaacaagcgttcattaaggatcctgacgttactattcaggaattggttgatagagctgcaaaagctagtggagagccgctaaaagttgagcactttgtcttttggaagataggcgcataa

SEQ ID NO: 10 - DNA, 1162 bp, Chlamydia muridarum
atgaaaaaactcttgaaatcggtattagcatttgccgttttgggttctgcttcctccttgcatgctctgcctgtggggaatcctgctgaaccaagccttatgattgacgggattctttgggaaggtttcggtggagatccttgcgatccttgcacaacttggtgtgatgccatcagcctacgtctcggctactatggggacttcgtttttgatcgtgttttgaaaacagacgtgaacaaacagttcgaaatgggagcagctcctacaggagatgcagaccttactacagcacctactcctgcatcaagagagaatcccgcttatggcaagcatatgcaagatgcagaaatgttcactaatgctgcgtacatggctttaaacatttgggaccgtttcgatgtattttgtacattgggagcaactagcggatatcttaaaggtaattctgccgcctttaacttagttggtctgtttggaagagatgaaactgcagttgcagctgacgacatacctaacgtcagcttgtctcaagctgttgtcgaactctacacagacacagctttcgcttggagcgtcggtgctagagcagctttatgggagtgcggatgtgcaactttaggagcttccttccaatatgctcaatctaagccaaaagtagaggaattaaacgttctctgtaatgcggcagaattcactattaacaagcctaaaggatacgttggacaagagtttcctcttaacattaaagctggaacagttagcgctacagatactaaagatgcttccatcgattaccatgagtggcaagcaagcttggctttgtcttacagactgaatatgttcactccttacattggagttaagtggtctagagcaagctttgatgccgacactatccgcattgcgcagcctagcttgagacctctatcttaaaatgaccacttggaacccaacgatctctggatctggtatagacgttgatacaaaaatcacggatacattacaaattgtttccttgcagctcaacaagatgaaatccagaaaatcttgcggtcttgcaattggaacaacaattgtagatgctgataaatatgcagttactgttgagacacgcttgatcgatgaaagagcagctcacgtaaatgctcagttccgtttctaa

SEQ ID NO: 11 - DNA, 1005 bp, Chlamydia muridarum
atgggtattcgacctactggtgggaataacggatatcagtcccttccaatttctggagacagtgacagtgatagcgtgagtaatgtcagcagtgctggatctcttggaagtcatagtatttcttcccaaggaagatctaaaggcatatgtgcgcgaatagctgatgtatttagaaattgtttctctcgtaatagtaaaactgcctccccatcatctagtaggtctattacccaagcggatattcatcacccaactctttctggacagggaacccaagcaattctctctaccggagatgcaaaagtggacagtgcagttattcatggagatttgcgtgcacagaatacacggacagtagctacccatattcagagtaaattaaaatccatggagaaacagtcatctggcaactataaagcaggggcgtatgatgcagtaagatatgccttgtttaccccaggtgggacctctgtgaatagccagcaagctcaccagatttgtactcgtggtagagacttgtggcaacagtcagtagacgatcttggggagcatgaaaatactgatggacttatgatgctttcttgcctctgtttaggagggagacaggtgcctacaggtcagttaagagagtttatggaaggggttagagatacctttaccgatgaaggagagtctgttgatccgacgacagatgatattcttgacttagcagcccaaatcgatgctgcagaactttctaaaccaggtagtaagaacgatatcttagcttacttagggaattgtgggaaagccactttagataatagccaagtgagtaatcttgttttagatagtcaagaagagaccagtcctcaacaagttcgagacaattcccaagagatccaacgattattggattatgcgcaacaaacagatcccgttttgtttttacaaacagtaacagcgctaacctccgatatattcttcgaaggcggagagagtgtaggagatcctttcgattactaa

SEQ ID NO: 12 - DNA, 2907 bp, Chlamydia muridarum
atgatggatttccttaagcgttttttcggatcttcccaagagagaatattaaaacgattccagaagttggttgaagaggttaatgcttgcgatgagaaattttcgtctttatctgacgatgagctccgcgaaaaaactcctcaattgaagagaaggtatcaagaaggggagtctttggataaactccttcccgaagcatatggtattgtaaagaatgtgtgtcgtcgcttggcaggaaccccagtggaggtttctggataccaccagcagtgggatatggttccctatgacgtgcaaattcttggtggtattgccatgcataaaggctttattaccgagatgcaaacaggagaaggaaaaaccttaactgcggttatgccgctttatttaaacgcgttaacagggaaaccggttcatctcgtcacggtaaatgattatttagctcagcgggattgtgaatgggtaggttcggttttgcgttggctgggcttaacaacaggcgttttagtctcggggattcctccagaaagacgtaaagcgatctatcagtgtgacgtagtttatggaactgcttcggaatttggatttgattatctccgggataattcgatcgcgacaagaaaagaagagcaggttggtcgtgggttctatttcgctatcattgacgaagtagattctgtactaattgacgaggcaagaacaccgctgattatttctggtccgggagaaaaacataatcctgtttattttgaattaaaagacaaggttgctgagttagtacatttccaaagagagatgtgtaaccatattgctgctgaagcaagaaaaaccttagatccatttttagggatggatgtgcttcctaaagatagaaaaattatggaaggcatctcggaggcttgtcgggctttatggttggtaagtaaggggatgcctcttaacagagttttacggcgtgtgcgggagcaccctgaccttcgtgctatggttgataaatgggatgttttttatcatgcagaacaaaacaaagaggaatgtttagagagactttcctccctatatatcgttgttgatgaacataataatgatttcgagttaacagacaaaggaatgcagcagtggatcgagaagatcggtggagctgcagaagactttgttatgatggatatggggcatgaatatgccttgatcgaagaggatactactctttcccctgaagataagttgaatcgcaaaatcgctgtttctgaaaaagatacgcaaagaaaagcaagagctcatggattgcgtcagctgttgcgcgcccatttattaatggaaagggatattgattatatcgttcgtgatgatcagattgtgatcattgatgagcatacaggccgtcctcaagcaggccgtcgtttttcagaaggtttacatcaggctattgaagcaaaagaacatgtaacgattcgtaaggaatcgcaaacttttgctacagtgacattgcaaaacttcttcagattgtatgagaaactcgcaggaatgactgggactgctattacagagtctcgggaatttaaagaaatctataatctgtatgttttacaagtcccgacatttaagccttgcttgcgtatcgaccataacgatgccttttatatgacggaacgagagaaataccaggctattgttgctgaaatcatttccgcacatcgttcaggaaaaccgattctgatcgggacggagtcagtagaagtttcagagaagctttcgcgtattttgcgacaaaatcgtattcatcacactgtactcaatgccaaaaatcatgctcaagaagctgaaattattgctggagctggaaaggtaggagctgtaacggttgctacaaacatggctggtcgaggaacagatattaagctggataaagaagctgttgctgctggggggctttacgtcataggcacatcgcggcatcagtctcggcgtattgatagacagctacgtggtcgttgtgcacggcttggagatccaggtgcggctaagttcttcctttcttttgaagatcgacttatgcggctttttgcatctcctaagctcaatacattgattcgacattttcgccctcctgagggagaggccatgtcggatcctatgtttgaccgattgattgaaactgcacaaaaaagggtagaaggccgcaactatacgatacgtaaacatactttagagtatgacgatgtgatgaataaacagcggcaaacgatttatgcgtttcggaatgatgttctgcatgcagatgatttgttcattgttgcacgagaacaaatcgagcatgtatcgctggctttggcgtttctaattttaaaagatgctcgtgcggaccactgctctttacccaaggttgaagagtggctgagttattcattccctgtaaagctcgatgatcaggaaattcgtcgtctaggaaatgtggatgccgttgctgattatatagggggcttattgatagaggcttttgatgctaaattctcctctatgctcactgagtttacggaaattattggatcagcgtctggtgctcagggggtttgcaatgatattcttcgttcagtgatcatttcgcatattgatgaagagtggaaagtgcatctcatggatatggatttgctgcgttccgaagtagggttgcgttctgttggacaaaaagatcctttgatcgagtttaagaacgagtccttccttttatttgaagggttaattcgggatattcgtattgcgatagtgaaacatttattcgctctggagttatccttaacacgaagcgacagacctgataatgctattccaactgttgcgacggcttttcataatcacgataattttcgccctatggagctaacaattatcggagaagaggaaaattag

SEQ ID NO: 13 - DNA, 612 bp, Chlamydia muridarum
atgacgttggtaccatacgttgttgaagacacgggtcgcggcgaacgagctatggatatttattctcggctgctaaaggaccgtatagtcatgattgggcaagaaattaccgagcctttggcaaatacggtcatagcccagcttctatttctgatgtccgaggaccctacaaaagacatccaaattttcatcaattccccaggagggtatatcacagcagggttagcgatctacgataccattcgttttctgggttgtgatgtaaatacctactgtatcggtcaagcagcttccatgggagctcttctgctttctgcagggacgaaagggaaacgttatgccttacctcacagccgcatgatgatccaccagccttctgggggaatcattggaacctctgcagatattcagctacaagctgctgagattttaacattgaaaaaacacctttctaatattctagctgaatgtactggtcagccagtagaaaaaattattgaagactcagagcgagacttctttatgggagcggaagaggctattgcttacgggctaatcgacaaggttgtctcttcagcaaaagagacaaaagataagaacattgtgtcttag

SEQ ID NO: 14 - DNA, 2310 bp, Chlamydia muridarum
gtgtcaatacaaccaaagtccgtttcttttactaagaatttagtagcaccttgggccggagagcaggttgattctgccgcgatgtatacatcgcaggctgtttttttctttcagcaattggacgaaaaaagcaaagccctaaagcgggctttaggattgcttgaagaacttgatgtcgaaaagtttactccatcgctagaagaaactcccacgataatacagccggaaataacgggaagaatttcctatgatgatatcgagattatagagtctcttacccctgatataattttagcggatcctgatagggcttctgctcaggtttttggggaagggcttgcggatagttttgatgactggctaacattatcggaaaatggagggcttcaggatcctactccagtagaacaggaaatagtgactaggtatcaaacggagctgaatgctttacgtaataaactcaaacaatctgtattaacgcccgatgaatatgcgagactgtatgcaatccctcaaacttttgtaaaagagatagaaagcataaaggatgaaaataatgttaggctgattcccaagagtaaggtaacgaacttttggcaaaatattatgctgacctacacgtcagtgacatcgttatcggagcctgtttccgatgcaatgaatacctccatagcagactattctctttatatcgaaagagctacgcaagctgctagtttaattcgagagattactaaccttatcaaagatatcttcaatcctatttgggatttaagcacccaaataataacgaatgccttctctttaaatggagcagagtttaactcattagaaggagggatcattcaaagcttattaagctttgcggggctttttcgacagttaatgagccgtacttcaactgttgatgagattggtgatctctatcctcaaaacgtccaaaaccaagatgttattcatacagctatcgatgagtatgtaaattctcttactaatttaaaagttaacgatcatgtgcaactcaatgggcttctaagcttggtttatgcgtatggagcaagtactttagtttttactcaaaagtctatatccaatagtaatcagatctctttaacagagtatagcgctgctttagaaaaagaaattcagtattgggttcctagagaaactgcgaatttcaaaatttctgatcaagcattaacaacttttaaagacaaaccttcagggacttataacggggttgcccttttcgattttaatggttcagcggtcaacattttcaatcctacattcttcttcgacgtagttagtcttatgactacagatcctaagaaagcaatgacaagagaagactacaatagggtgattgctgcttcagaatcgagtattaggaaaatcaatgaatccattgctgcatgggaagctgctattgcagaatgtaatgcaaaaaaagtacagatggatcctgcagggcgcaactattttgatgctatggttttagcgaagcagactttcgtgaacacttctccaatacagatggtgtatgcgtcattgatgttggataagtatcttcccaatcagcagtacatactggaaacattgggaagtcagatgactttctccaataaagccgctcggtatttaaatgatattattgctcactcagtaagttttcaaacagcagacgtgtattatgctttggggatgtatcttcggcagatgaacgttcaagcatttcctgagtcaatttctcgagctaaaaatcttttaaacaaagagatagagcgatgtcgtgcggatctatttcactgtcaaagagctatagaagagatcaacaagctatctgcaagtgtaaaagcagatactgaattgacttcatcccaacgatcagagttattagaaactttagctagttatgcttttgaatttaacaacctttatcacaatctctctaatgtttatgccatggcttccgtcatacagatttcgggtgtagataaacctgatgaagtggataaagccttcactacgactattggaacaaaagatttagatacctggattcaacaattcactatttttgaaagtgcagttattgaaggagggcgtggtggagtgatgcctggaggagagcgacaggtattgcaaagtctagagagtaagcagcaagattacacttcttttaaccagaatcaacaattggctttacaaatggagtctgctgctattcagcaggagtggacgatggtagcagcagctttagcgttgatgaatcaaatcttcgcgaagttaatccgtagatttaaataa

SEQ ID NO: 15 - DNA, 1173 bp, Chlamydia muridarum
atgaaaaaccaaccgattcaagcaagacagaaatattttgttccaatgacagaaactgccgctcctagagaacgcagagtatctcctgcagaagtggctgcggactacacacagttgcatgaagcggcaacatatcttcaggtatttcaagatttattgaacgatacgcacgagttgggattccaagaagagtttatagaaaatttgcgtcaagatttgttaaaaatagattcagagatgtctttgatgcaagttttgtgtgctgaagatagtcaaagagaagcacgtagaaaagagcggcaagaacttcagcggcagctagaagctcgagtattaggccctcaggcattgacaactgctgaagagttgcaccccgtagacggaagcatcattaacaaaatgccatttcaggctgcctttgcttacatcctgctagataagtatattcctgctcaggaagaagctttgtacgcattagctagagagctcaacttctctggatatgcgcagacactatttagtcctattttagaattagtcaaaagctttaataacgctccgatcgtgtataacttaggatcgtatattgggcaaacaaatggaacggctaactttagatatggctatcagatggttatggatcgttacgaaatggagaatagccagttaagaaaagatatgaaaaatgcagagaatgcaaagctgcaatttgcgcaggttatcaaaaatgtagacgctaatagttctttaacaacaacccaaaagactaagctaaaagagatgtcaaacgggtatattcagaccttggatgcctgtcttacacagatgcaagcgttatctgcgggcttgcgagggttggctttcatccctggaagggatgaatttagcccagcttatgagattatgggttcttcattttctgtagttactttacaaaatttagaaggaaatgtggttgatggagagcttgatattatttcaggagaagtaaaaggtgggctgttaaactttttcacctattttcttgctgatgtgcaaaattttggagacttagctcaaacgaatcagttaatgctggagttacaaatgcgcgctatgcatcagcagtggagtatagtctcagcttctttgaagttaatgcataatgtttatagaacgttaggatccgcttaa

SEQ ID NO: 16 - DNA, 1980 bp, Chlamydia muridarum
atgctcccacaacttttctcttctccattttcacgggaattactcaacgatttttttgaatcagggatggcagaggaaaacagtcctttactttcccgaaagaatcgtcttttaagccaaaacttaaccctaaaatctgcctacatatcccttgctctttatatagggtcgcttctttctcattggaccggatatcagcctctctcttctttgctacttattcttactttcttcctagctggaacgcctgccctcgtaaaatcttttgaggatattcttaataaaacggtgaatatcgatattctcatgacatctgcagctttcggctctattttcattggaggagccttagaaggcgcattgcttttagtacttttcgctatttcagaatctctaggatcgatggtctcagggaaagccaaaagtactctcgcttctttaaaacatttggcacctactgtagcttgggttgttcaacaagatggctcattacaaaagattttagtacaaaatgtaaaagtcggagaggttatccgagttaagagtggagaggttgtccctttagatggagaaattatccaaggagcctcctctattaatctgatgcatctaacaggagaaaagattcccaaatcttgtaatattggggatacggttcccgcaggagctcataacttagaaggaagttttgacctcaaagttcttagaattggagcagagtccaccattgcccacatcatcaatcttgttatccaagcacaaagcgctaaacctaaactccagcaacgtttagatcgttactcatcaacgtatgccttaacaatcttcgcgatctcagcctctatagcaataggcggttcattatttacgacactgcctttcctagggccagacagtgctttttaccgagccttagccttcttaattgcagcttctccttgtgcccttatcatagctatccctattgcctatctcagcaccattaatgcctgtgccaaacatggagttttactaaagggaggcgtagtcttagatcgcttagtctcttgcaactccgtagtgatggataagactgggacactgactaccggagacttaacctgctgtggatgtgaagattttggccctgaatcccctcttttttactcctatgtgctagcaatggaacaatcttcgtcccaccccattgctcaggcaattgttaattatctaacagagaaacaagtgcttcccctaccggcaacacaatgtactaccattccaggcgagggtgtacaaggagaatttaatggagatcaggcctttgttggacgagtctcaacagccctacgctatgtccctgaagaatatcgagaacaacttcgcgaacgtgctcaacaagcacaagcgcgaggagagacctgttccattgcttgctctgggcaacgcgtgtctcttttttactttcgagatgccccgcgccatgatgctgcagatattgtcgcctatttgaaaaaaaatggttatccagtatgcatgctcacaggagatcatcgtattagcgcagaaaacacagctcaactgcttggaattgatgaagtgttctacgatctaaccccagataataaactttctaaaatccaagaactcgcaaagactcgacaaatcatgatggtgggagatggaattaatgatgccccggctctagcgcaagctactgtagggatcgctatgggggaagctggcagcgcaacagccatagaagctgctgatgtagttctcttaaaccaagggctctcttctcttccctggctgataaaaaaagcaaaaaagactcgccgaattgtgtcgcaaaatcttgctttggctttatctattattttatttatttcaggaccagcatctatgggaatcattcctttatggcttgccgtaattttacatgaaggaagtaccgtgattgtgggccttaatgctcttcgccttttaaaaaacacgtga

SEQ ID NO: 17 - DNA, 453 bp, Chlamydia muridarum
atgcaacttacttcgcaggctttttcttatggccgtccgattcctaaaaaatattcatgtcagggggttggaatctctcctccgctttctttttctgatatcccttcagaagctaaaagccttgctcttattgttgaagacccagatgtccctgccaatgttcgggaagatgggttgtggatccattggatagtatataacctctctcccatagtatctaatcttgcagagggagctcaaatttttgctgttcaagggataaatacagcaggagaaataggctattgccctccttgtccgccagacgcaaagcatcgctattacttctatgcctatgcattggacgttgttctccctgaagaagagggagtaacaaaagaacagttgttagaggctatggaaggacatatccttgccacagcggaactgatgggcacttatgaacaagattag

SEQ ID NO: 18 - DNA, 1296 bp, Chlamydia muridarum
atgtcttggctttcaagcctgtaccctatttttattgcttctaccgcattttgtgctttaggccttcttcttgtagccatcatccttctttccaggaaatttcttatcaaagtgcatccctgtaaactgagaatcaataatgatgactctcttactaaaactgtagatagcggaaaaacgctcctttcctctttgcttgattctgggattgctatcccttctccttgcggaggaaaagccgcatgcaagcaatgtaaaattcgcattacaaaaaatgtcgatgagccattagaaacggatcgctctaccttctcaaagcaacagttggaacaaggctggcgactttcctgccaaacgaaagtacaacatgatatgaacttagaaattgaagaacgttatttcaatgcttcatcctgggaaggcacagttgtatcaaacgagaatgttgcgaccttcattaaagaacttgttctgtctgtagatcccgcacgtcctattcctttcaaacctgggggatatctgcaaattaccgttccctcctataaaactaatacctctgactggaaacagactatggatccccaatattatagtgattgggaaaccttccacctctttgataaagtgattgatcaccaatctttggatgccaactctgcaaataaagcatattctctagcttcttatccagcagagctccctcttatcaaatttaatatccgtatcgcaacgcctccatttataaataaatcccctgatccaacgattccatggggagtctgttcctcctatatattctccctcaagccaggtgataaggtaactgtatctggtccttatggcgaatcattcatgaaagaagataaccgtcctgttatcttcctaattggaggagctggctcctcttttggaagaagccatattcttgatttattattaagcaaacatacaaaccgagagcttacgttatggtatggtgcccgctctcttaaggaaaatatttatcaagaagagtatgagaaattagaaaaggaatttcctaactttcactaccatcttgttctatctcaacctttgcaggaagacttagataaaggatgggacagtaaagacccaatcaaaacgaactttttgtttaaagcttttgagctcggacaactgagcaagcttcccaatccagaagactatctatactatgtttgtggtccagcacttcacaacagcagtattcttactttacttgataactacggagttgagcggtcttctattatcctggatgattttggaagctaa

SEQ ID NO: 19 - DNA, 345 bp, Chlamydia muridarum
atgttctctcgtgtgttgtttagtatccttttctttctaggatgttgcccatctttatttgcagatgttgattctcctcaacgagcaacatttggacagcctgcagtgatgttaggaattgctatcgtctttttctattttatcttatggcgaccagaacaaaaacgccgccaagctatggaaaaaagaaaaagcgagttagcagttggagataaagtgactgctatgggcatcgttggaacgattgccgaaatccgtgaacacactgttgttctgaatatcgcttctggaaaaattgaaatccttaaagcagctatttcagaaatttttaaggctgaaaaataa

SEQ ID NO: 20 - DNA, 378 bp, Chlamydia muridarum
atggcgctaaaagatacggcaaaaaaaatgacagatttgttggaaagtatccaacaaaacttgctaaaagcggaaaaagggaataaagccgcagcacagcgagttcgtactgaatccatcaaattagaaaaaattgcgaaagtttatcgcaaagagtccattaaagcagaaaaaatgggcttgatgaaaagaagtaaagtagctgctaaaaaagctaaagctgctgctaaaaaacctgccaaagccactaaagttgtaacgaaaaaagcttgtacaaaaaaaacttgcgctactaaggcaaaagctaaaccagtaaaaaaagccgctactaaaacgaaagctaaagtgacgaaaaaagttcgttcaacaaaaaaataa

SEQ ID NO: 21 - DNA, 573 bp, Chlamydia muridarum
atggttcgtgtaagcactagtgaatttcgtgtaggattgcgagttgagatcgatggccagccctatgtaattttgcagaatgattttgttaagccagggaaaggccaggctttcaataggatcaaagttaaaaactttttaactgggcgagtaatagaaaaaacattcaagtccggggaatctatagaaacagccgatgttcgtgaacagcagatgcgtctcttgtatacggatcaagagggggctacgtttatggatgacgagacctttgagcaagagctgattttttgggataaactggaaaacattcggcagtggttgttagaggatacagtttacaccttggttcgttacaatggggacgtgatttctgttgagccgcccattttcatggaactatctatcgcagaaactgctccaggggttcgtggagacaccgcatcgggccgagtactgaagcctgctacaacaaacactggggcaaagattatggtccctatttttattgaagagggtgaagttgtgaaggtggatacgcggacagggagttatgagtctcgcgtatcaaaataa

SEQ ID NO: 22 - DNA, 1542 bp, Chlamydia muridarum
atgcctagcgaaaacaatgagatgcatcgcagtaccatccatcaactgttctccggcctggataaagcttaccaaatagtcaaagggttttacggtcctgcttactcctttactacgaaagatttttccctgaaaggaaagggctaccacattctctctcgtatagaattgttagaccccttggagcgtctcggcgtatattttgcgcaatccttagcagaacaaatctacaatcgccatacagatggagtcatctcttccgttatcctcttgcgagcgtttttaaaagcctcgctcccctttattgatcaagggatatcccccagacttcttacatcggccttagcctcaaaaaaagaagctatttgcgctcatttacaagcccactcattcctcttaaaagatacttcaaaagtacttggactaataagctcacacactaatgatccttttattggagaagtatttgcacaagccgttgcatatacaggacaagaaggcaccattgctctatcccaaaaaagcggatctactctacgtttcgttcaaggaatacaaatacaacgtgggtatcaagtcccttcttttttcccacaagatgcttttcatgaaaacctcgtgatagcccccaaaatttttgtcacagaccaaacaatccattcggttttctcttttcttcctctacttaaacagttttctgaagaacaaactccccttatcattttttgcaaagagattgatcatcatcctctcgccacttgtattgcaaaccgtatagcagggcttgtggatgttctagtggtaaccatagaagatcccacccttctagaagacattgcattacttacaggaactacagtgttttcaacgcctcctttctccaataaacctcccatagaacttcccttactaggttcttgtacatgggctgaattgtctcaagatcacaccctattagtttgtgaaaattttgttccagaagttgtgaaattaaaaattcgccaactcgatcatatgatacaaaacgcggaaaaagaactttctcgacaaacactcaaagagcgcaaacatcgcttagaacacccaatcgcaattattcctattgaacaagacaagtcctccctatacaaactcgctttaaatactctaaatactacaaaaaaatctggttttgttgtgggaggtggggcagctcttctttacgcttcacaaaatcttctatcatctcaagatcagtctcaagaagaactcgctgcttcacatatcttacagaccgcctgtcgagctctcctagagcaactagttggctccgtacatatggatgggaaacttgttgctaacaaactctgttcattaggaactcctagtcttggattcaatgtcctctcgcaacaaatagaagatatgatctctgcaggagttattgcacctttagatactgttatggatattttctcatcttccctccatgcagccttagatctcctcctttcctcctatacaaccccgcctagtcctataacgaacgataaaaaaacttaa

SEQ ID NO: 23 - DNA, 1359 bp, Chlamydia muridarum
ttggttatgcgccctattttattaaaagagtggtcttctttgttattagatattgacattccttgctcagggaagaaagtaacgggagtcgctattgacagccggcttgtattgccaggggatgtattttttgctcttccagggaatcgaactactgggcacctatttttaaagcaggctgcgcaatccggagctgttgctgctgtagtagcgagtgattatcgtggaccagattatgggttacagttgttacatgtggcagatcctagagaagctttaagagcggctggacgaactcagggagctcttttccatggagaagtgatagggataactggctctgtagggaaaacgacaacaaaaagttttacccaacaattactttctcctttttacaaagtctttgcaagtccgaaaagttataattctcagctcactctacccctaagtatattaacggccgatggagatgaggattttcttgttttagagatgggagtttctgaacccaataatatgaaggatcttttagatgtaattgagccttctattggagtgattactcacatcgacgttcagcatgcaatgaattttgtggataaaggggctcaaggtattgctgaagagaagagtttgttgttagagagatgcgggattcatctattgcccagagattcttcatggtttaactttttcatgaaaaagaatgctgcagctgatcagttttctttttctatgaataatgaaacagcagatttttactatcgagccattcattccgaaggggtcctcattagtgctcccgatggggatattgagctgcctgtagtgttcccttatactcccgcttatatgaattttattattgctgtagctttagcttggcttactaacgttccaatggatcgtttagaacaggcaagtcaatctttatttttgccatctatgcgctttgaacaacaggaacacaatggtattcgaattattaatgatgcatacaatgcaagcccagatgcaatgctagctgctttagatgctgtccctatcccctctgagggaggtaagacagtatttatcttgggccatatggcggagttaggaagatattcggacgaatgtcatattgctgtagcaagaaaagctgtgacaaaagcacacgtagtttttttcgttggagaaaagtggtcccctgttagagaggttgtttctgatgcaaattgtcagatagagttttacggttctgttagcgagattatgcatgttgttaaatctttagtgcgacggggagatgttgttctgctcaaaggatcgcgtagtttggaattggagactttgttgccatgtttttccatctcgtga

SEQ ID NO: 24 - DNA, 732 bp, Chlamydia muridarum
atgaatcgtagaaacacgatgattgtagcagcttctgtgaatgcagtactcttggcagtgctgtttatgacagcacgctattcagagcaagaggtagagtattcgcagaaaatagcacctattaaaattttagagccggtaccagttgttgagaaggctcctgaaaaattagaaaaaaatccagaagtgatcgctaagcccgcacaggttgtgagaaatcctgtagtctctaaagcggagcttgctgcgcaattcacagataaaaatcaaactgttgagaaagagatcaaagtctctcctaaagcgacgcctcctcctgtggttgttgaatctcctacatccgaaattcctgttgtgcaggaaaaaagtgcagacaaacctgcagagcaagaagaattttctacagttattgttaagaagggagattttttagagcgaattgctagatcccatcacactacagtttctgcattgatgcaacttaatgatttgtcgtcgacgcaattacaaataggacaagttttacgcgttcctaaaacgaataagacagagaaagatcttcaagttaagacccccaatccagaagattattatgtgattaaagaaggggatagtccttgggctatagctttgagtaatgggattcgattagatgaattgttgaaattgaatggattagatgagcagaaagctcgtaagttgcgtcctggagatagattacgaattcgatag

SEQ ID NO: 25 - DNA, 414 bp, Chlamydia muridarum
atggaaaattttgcagcgtacatcgtgaaaaatttagtcactgatcccaattccgtcaaaattcgatcatccgaagataaagccagcgcaactcttaagctggaaattcacgcggactccgaagacattggaaaaatcattgggagaaaaggacaaactatacaagcattaagaactattctgaaacgcgttggcgccagactacagaaaaaaatccttgttgagcttgctcaaccagaaaatatctctcctgtggatgaagaatctttatctctaggccatgcagcaacagactcttctgacgattttgaagaggattcctttattgaagatagctttgaagaagaatcctcagttgctgtcagtactttagcgggcacatgccatggctgtaattgctctcatcatagttag

SEQ ID NO: 26 - DNA, 630 bp, Chlamyida muridarum
atgtctaaaacaccattatctatagtccatccttggcatggaccagtattaacacgcgatgattacgaatctctttgctgctatatagagatcactccctctgattcggttaaatttgaattggataaagagacggggttactaaaagtcgatcggccacagaagttttccaatttttgcccttgcctatatggccttttacctaaaacttattgtggggatctttctggggaatatagtggccagcaaagcaatagagacaacatcaaaggagatggagaccctcttgatatttgtgtactaacagaaaagaatatcacccaaggaaatatcctgttgcaagctcgacctattggaggtattcgtattttagattctggagaagctgatgataaaattattgctgttctagaagatgatctcgtttacggagctatggaagatatttctgactgccccggatctgttttggacatgattcagcactattttttaacgtataaggccactcctgaaagtttaatccaagccaaacctgctaaaattgaaattatcggcttatatgggaaaaaagaagcccaaaaagtcatccgactagcgcacgaagattattgtaatctttttatgtaa

SEQ ID NO: 27 - DNA, 1053 bp, Chlamydia muridarum
atgtcttctttacggattactagaagttgctcttttaaagggagaaagcttttagctaccatgctcttcttcggactaggctcatctagcttgtgcgctactcctttggacgagcgtaatgagctttcttggtatgttgattatcaagaggctaaaagcaagagcgaagagaaagatttgccgatgttgttgtttttctctggttccgattggaacggaagctgcatgaaaattcgagatgaagtgctgagttctgcggattttatagcgacagtttctgataaatttatttgtgtatctgtcgactttcctcgccatgcagagttacaagattcgcggatcaatgaacaaaatgaggatttaaaaaataagttacacgtaagtgttttccctagtttagtactattgtcccctgaagaacgagaaatttataagattgagagctttgggaacgaaaatgggtctaatttaggagagagcctttgtagggtaattgctaacgaccgagaattagagcacattttcccgcttattccttccttgtctgcagcagaattacgtaagtactatcagcttgcagaggagctatctcgcaaggatttcatggctacagcccttgatcaaggagtgttgtgcagtgatagctttttcctatctgaaaagtttcgacaactagttgaagccggtagaatggattcggaagaatgccgttctataaaagatcgtttgttggaattagacccagagaatgaacagcttactcacctcactgttgccttaattgaatttcaagagctagtaaagcgctcccagggtgcaacaaatgcaaatattgctgaagtgttagagcctttggtagggtatcttacacaatttggagagcaagataaggaaaatcaatggagacttgagatgattatttctcaatattaccttgatgcagagcttcctaatagtgctttagaacatgccgagattgctttcgaggcagcgccacaagatgtacaatcgagcatttctcgctcattagatcatatgcgacatcagtcttaa

SEQ ID NO: 28 - DNA, 495 bp, Chlamydia muridarum
atgagattcttgttagccttattctcgttgatactggttcttcctacaactgaagcattctcacaagaagagcgtcagtgtccacaagaggtagaggaagactcgcgtgggaaggggaaagatacttgtgtattttatagttatgagcaagctttacggcatgcaagagaacacgataagctgaccttagttgtgttattagatcgttccgaagggttttctttcgagcttctttatgaagtggcttcctctatggaggactctttgttagcagagtttgccgattttgttgttcttgctagaactggggtcgtcccgcttatctatcctcctattcaggatcctatgattggggagattacagcctttttggcggcattccctgatcaagagtttccagaacagcctgcgattattacaatagctgttggggatacctctgcagaaattatggatatcacgttgattcctcaagtgtctgaagatatcaagtaa

SEQ ID NO: 29 - DNA, 1425 bp, Chlamydia muridarum
atgaaaattactcacacagctatcgaatttgctccggtaatcaaagccggtggcttaggagacgcactatacggactagcaaaagctttagccgtcaatcatacaacagaagtcgttatccctttatatcccaaattattcacttcgctccacgagcaggatcttttcgcaactcaaaaaatcccttatttttttgccggagaacaagaagcaacagccttctcttatttttatgaaggaatcaaagtaactctactcaaattagactcgcagccagaactatttgaagaagcagaaacgatctatacaaacgatgatgcttttcgtttttgtgctttttctgctgctgctgctgcttacattcaaaaagaaggagcagacattgttcacctgcatgattggcatgttggattagtcgcagggttactcaaacaacagccttgcccccagctacaaaaaatcgtgcttaccttacataattttggctatcggggatatacaacacgagaagtattagaagcgtcttctttgaacgaattttacttgagccactatcaactatttcgcgatccacaaacctgcgtcttattaaaaggagctttatactgttcggactttgtgactacagtttctcctacatatgccaaagaaatccttcaagactattcggactatgaaattcatgacgccattaccgctagacaacatcatcttaaagggatcctgaatggaatagactatacgattttggaccctgaaacagacccccatttagctaagaactatagtaaagtccttttcgaggatcctaaagctttcttcgaagcaaaagcggaaaataaaaaagctctgtacgaaacgttaggactgtctttagacaaatccccctgcatgtgcatcatttctagaattgctgagcaaaaaggcccagaatttatgaagcaagcaattcttcatgcactagaaaacgcctataccctgatcattataggcacctgctatggaggccagatacataaagaattttctaatcttcaagaatctttagcagactcccctaacgtgcggattcttttaacctatagcgatgtactagcacggcaaatttttgctgcagcagatatgatctgcattccctctatgtttgaaccatgcggactcacccaaatgattggcatgcgctatgggaccgtccccgtagtaagagctacaggaggtctggctgacaccgtaacagatggagtaaatggattctctttctctaaccctcatgatttccacgagtttcgaaatatgctttcaaaagcgattgccacctaccgagacgaccaagataagtggcaacagattgttcgctcttgcttagagttttcttcggacttagaaactgcagccaataaatatttagaaatttatcaacaataa

SEQ ID NO: 30 - DNA, 1353 bp, Chlamydia muridarum
atgattttgccttactattcctcaggattacgcattggatctgccgttctatttttttctgcagtgatccatacttttcttactccatggttaacgcgactatatgaggaatgtctgcataaaaagatgatttttccagaacgctggcgtcaatacctttggttaagtgaacttcttcgtattgttagccgcgttgaattagtgtttgtgctttgggcgatccctctgttttttttatttttgtatacagaggggtatcgcgtaacaatggcctacttcgatagccgtaactacgtattctctctttttattgttgttatgctgattcttctcgaatcacgtcctatcgaatatttatcccaaagaatcttttcatcagtcgctaaaattggaaagcagtctccgatttgttggtggtggaccattatgattgcagcaccactatctactttcttccttaaagaatccggggcaatgattattgctgcgacactactgtcaaaacacttttatcaactcgcaccatctcccaagttttgctatgcaactatgggattactcttttctaatatttcgattagtggattgacttcatctttctcatctcgagcactactcactattcttccagaaattaaatggacgagtagtttcattatcacccatttctgttggaaagtcattttagctgtccttatctccacaacgatttttttcttattcttccgcaaggaattcaaaaaatttcctaagacaattccaagttcaaccataatgcagaatcgagtcccttattggactattttcattcatgttgtcttggttggatgtgtcattctcagccgagcaattcctttgtttttgggctttattcttgttttctacttagggtttcaacgcttcactattttttatcaaaacccaatcaaaacagcgaaagtctgctttgtaggattattttatgcaggggtagtgattttcggagaacttcaagaatggtggatgcttgatttaatgcacggtatgtcagactttggctatatgatgacctcatatatgttttctatattcttagataatgccttagtaaaccatattgtgcataacctccccatggctaatgattgctatctatatctggtacttgttggaagtatgtctgcaggaggattaacacttgtgtccaacatgcctaatattgttggataccttattcttagaccgactttcccccaatcagatatctctttaattagactattttggtcagcattgatcccctctattgtatccttaagtattttttggcttcttagaggaatcccctcatttatgttttgtttatttcgctga

SEQ ID NO: 31 - DNA, 2820 bp, Chlamydia muridarum
atgaagcgttctcttctcctattatttttctgcagttcttcttttctcacctcttgttcaaaatcttttcaaacgattcaagatgaaaatcctttaacaattttaacccctgcattagcagaccaaaaaatagcgaaaattatctgccctaatgggcttcccctcatgattgtttcctcccccaaagcttctgaatcgggggcagctttagttgttaaaactgggaataacgctgatcccttagagttccccggattagctcattttacagaacactgtgtgttccttggcaatgaaaagtaccctcaaccctcaggattcccagcattcctgagtactcatggagggatttacaatgcgtttacttacccggataaaacatgctttttgttctctgtaaataatagtgacttagacactgctctggatcagtttgttcatctctttattcatcctttgttccgccaagaagatttaaacaaagaagtccatgctgttgagcaagaattcgcaatgcatccaaccaaagattctcgtcgcatgcatcgcattcagcaaataatagctcctaaagagcacccattaaagcgtttcggttgtgggaatctctcgaccttggatactgtaacctctcaagacatgcaaacatggttttctacccattactctccggaaaacatggctgcaatcgtctacactacagctccattagatgtagctgttccttatatagcaaaaatcttctctcaaattcctaaatcctcgaaatataccccacaaactcctttcacaaaaacgcaggatacttcctcccttaacaaactgttcattaacaaagctgtggaaccttctccacaactagctatctactggcatttatacgacgcaccagcttctctgcaaggatgggcgcagtcactggtttctgtgctatccagtgaaaaagaacatagccttattgctttgcttaaaaaagaacatcttatcacccacatggaggctgggacttataacacctctctcaacactcaagattttgaaatcatttataaactcacgaccaagggagaacgtgaatatcaaaaagtccttcaacttacttttgcttttcttgattatgttcgcgatgaacaacttcccgcctatattctcccagaactacatagaatcaattctttagaatacacctatagtacacaaacagaattgttcttaactttaacacaaatgatcccagattttgcttctgaacccctagcaacttacccctatcaatctactatctatccaaaatattctcatgaggacgaacaaacctttgctgcattattagcggatccacaacaagctcgctatatcttatcagcgactctaccaagctccttagaagatgcggacgagttttatgaccctatttttgataccattttctatgagaaacctttaaactttgagcctataaaggactattcctctctcgggtttacttttccacagcccaataaatttattcctcaaaaagtccaattattatctcaaaagaaacaacacgagggatttgctttttctccaaaactcacttataaccaagacgctattactctatacacctgcgaagattccttctacaccgtcccaaaaatggctatggaactccgtatccgatctcctcaaattcaacgagcagatgttcgttctttagtcttgcgtgatctatacagccttctagcaaacgaaacattagtaaaacattatgacgaggccttaagagccggaatggatttttcagtatctcccggagctacaggtgtagacctgtctctttttggctatacggagacctctccagttcttattgactctctattatcttctctacgcgatcttcccttagataagagtctttttctgtactacaaagaccagctctccgagcaataccaaaaaggtcttatttcctgccctatgcgagctggtctcaataaactctctggggaactcctagaaggcttcttttctctagaagaaaagcaaaatgctttagatatcatctcctatgaagaatttgaggattttgctcacaaaatgctcactgaactatctatagaggctttcacgctaggaacactttcttcacaagatctttctaacgtattagcatctctttctcatttttcagaggcttctttaccatatgatcctcctagttactatcctaagagaaagcctctcttcacaacagacttctctttccaatatcctctttctgggaatggtatgctcctgcttgaacaaaacgagcatcccaatcagtatgaagattctgtagctacgagcatgttattatcttggatccacaacttgtattataatgatttgcgtaccaaccaacagcttggatacatggtaggtgctaaataccaagaatttgcagaaactccttgtggactattttatattcgctcgaacaaatcttctccagaagagcttgtgaataaaacacaactcttcctacaaaagattgctactgatccggaagcctcaggattgtctgaggaaatttttgaacaacttcgagaaacctatattcaatccgttttacttccaagtgcaacgccttcagcaatggcaagaaaattattttctatagcctttgaaacagaaaaacatgatttctcccgccctgataaaaaaattgctgcagcccgttctatgaactactcctatttcaaagagtattgcaaagaattttttaatcaaaagtttgggccagaaatccagcttcttatttacggatctgactcacaacaaaacgaataa

SEQ ID NO: 32 - DNA, 1494 bp, Chlamydia muridarum
atgatgaaaagattattatgtgtgttgctatcgacatcagttttctcttcgcccatgttgggctatagtgcgccaaagaaagattccagtactggcatttgtcttgcagcatctcaaagtgatcgggaactttcccaagaagatttgctaaaagaagtgtctagaggattttccaaagtcgctgctcaggcaactccaggagttgtgtatatagaaaattttcctaaaactgggagtcaagctattgcttctcctgggaataaaaggggttttcaagagaatccctttgattatttcaatgatgagtttttcaatcgattttttggtttaccctcgcatagagagcagcctcgtccccaacagcgtgatgctgtaagaggaacaggttttattgtgtcagaagatgggtacgttgtgaccaaccatcacgtagtggaagatgcggggaaaattcatgttactttacacgatggacaaaaatacaccgcaaaaatcataggattagatcctaaaacggatctcgctgtgattaagatccaagcaaaaaatctcccttttttaacttttggaaactctgatcagcttcagataggggattggtcaatagccattggaaatcctttcggattacaagccacagtaaccgttggcgtgattagtgctaagggaagaaaccaattacatattgttgattttgaagattttattcagacggatgcagcaattaatcccgggaattcaggtggtccattattgaacattgatggacaggttattggagtgaatacagcaatcgttagcggtagcgggggatacattggaataggatttgccattcctagcttaatggctaaacgagttattgaccaactcattagcgatggacaggtgacgagaggatttttaggagtaaccttacagcctattgattcggagcttgccgcttgttacaaattagaaaaggtgtacggagccttgattacggatgttgttaagggatctcctgcagaaaaagcaggtttgcgccaggaagatgtcattgttgcttacaatgggaaagaagtggagtctttgagtgctttacgtaatgcgatttctttgatgatgccagggactcgtgttgtcttaaaagttgtgcgtgaagggaaattcattgaaatacctgtcactgttacacaaattcctgcggaggatggggtatctgctcttcaaaaaatgggagttcgggtacagaatcttactccagagatatgcaagaaactaggattagcgtctgatactcgagggatttttgtagtgtccgtagaagctggttctcctgcagcttctgcaggagtggttccaggacaacttattctggctgtaaacagacagagagtttcttctgttgaagaattgaatcaggtcttgaagaatgcaaaaggagagaatgttctccttatggtttctcaaggagaagtcattcgattcgttgttttaaagtctgatgaatag

SEQ ID NO: 33 - DNA, 2763 bp, Chlamyida muridarum
ttgattagcattgtagtgagttttatggctaaagataaaaaaacaaatccagaatctaaaaaaagttttcctactgcttttttctttcttttgttcggagtaatttttggcgtagttacagtccaaaactttttctctgctaaaaaagcttcggtgggcttcagccatcaactcgaacatctcgtgaatctcaagttactgattccagaagagagccgtaagatcgctttgaatgataatttagtgtcattcagtggacgtttccgagaatctgttccagctgaaggtcaggttcggtaccagtatcttaatcttattgatcgtaaacatcagatagattttgagttggaagaaacaacgacatccttgtcggttttatcaaaagaagttcgtaatgcggtcacttggttttcagctatttctggaatgccaatccctgaatccggttatactatttctcctcgaacggatgtaggactttcggttttagagcctttagttattcatggtcctgtaagtgttcagattgtgaatctggctactttggaagaccgggtacgttctttacctagatctgcagaaagtcttagagtttttggttccgatttgtatgcgttgattgggaaatatctttcgccagctttgggaataggctctgaatccttgaaaaaagaaattaaggatttgtatcagcaggtagaaagttctctaactcaagttgttgaaggggagcaggctatcaccttgtacaaaacagtattagagactttacataggatttctttatcgcttgtttctccagaggatggagctcgtttcaatcaattgcgttccgtacgtctgtatcgtgaagatttcaacagatgtatgaaattattaggggaaagtgatgaaattcaagctcagctcgacaaaattcggggtgaattagtccaggctgtttggtatttcaataaccaagagctttcttctcgagctttagagaaacaagatcctgaagttttcagccgatggtttgaaggtgctaaacaagagtgggccgcgttctctggaaacaaatctttgtcatttagagctccagaccagccacgaaatttagttttagaaaaaacatttagaagtgaagagccaactccccactattctagttatcttttcacttttatgccgattattttggtcctgctatttatctactttatcttttctcgtcaggtaaaggggatgaatggttccgccatgtcatttgggaaatctcccgcgagattgttaacaaagggacagaataaagtaacgtttgctgatgtagcagggatagaggaagctaaggaagagcttgttgagatcgtagatttcttgaaaaatccaactaagtttacgagcttagggggacgtattcctaaggggattcttcttataggggctccaggaacaggaaaaactttaattgctaaagctgttgctggtgaggcagaccgtcccttcttctccatagcaggctctgatttcgttgaaatgtttgtaggggtcggtgccagcagaattcgagatatgtttgagcaagctaaacgaaatgctccctgcattatttttattgatgaaattgatgctgttggtcgtcatcgtggtgctggtattggagggggccatgatgaaagagagcagactttaaaccagctattagtggaaatggatggcttcgggacaaacgaaggggttatcctcatggctgcaacaaaccgtccagatgttttagacaaggctttgttacgtccaggacgatttgatcgccgtgttgttgtgaatctccctgatataaaaggccgtttcgaaattctttcggttcatgctaaacgcatcaaattggatcctactgtggatctcatggcagttgctcgtagtactcctggagcttcaggagccgatttagaaaatcttctgaatgaagcggcattgttggctgctagaaaagaccgtactgctgttactgcggttgaggttgcagaggctagagataaggttctttatggtaaagaacggcgtagtttagaaatggatgttcaagagaaaaagacaacagcatatcacgaatcaggacatgctattgttgggctttgtgttgagcattcggatcctgtggataaggtaaccattattcctaggggattgtctttaggggctacacacttcctcccagaaaaaaataaattaagctactggaaaaaagagctttatgatcagttggctgttcttatggggggacgagctgccgagcaaattttcctaggggacgtttctagtggagcacaacaagatattgcgcaagcgacaaagatcgtacgtagtatgatttgtgaatgggggatgagcgatcagttgggaaccgtagcctatgatgagcgttcggatgcagctcctactggatatggatcttatcatgaaaaaaattattcagaagagacggctaaatccattgataatgagctcaagactctattagatgctgcatatcaaagagctttggatattattaacagtcataaggaagaattagagcttatgactcagatgttaatagaatttgaaactttggattctaaggatgttaaagaaattatggaccattcttgggatgcagagaagaagcgtgctcgtatgaaggaagaaggtatgttgtataagaaagtatcagaagatcttcctcctccccctccccaagaagatgtgcaggatggaacgttgaagtttaatatcggcacgtaa

SEQ ID NO: 34 - DNA, 2082 bp, Chlamydia muridarum
atggcttttgagactttttctgttgcgttagacaaagataagacactgattttcgagacagggaaaatagctcgccaagccaatggagctgttcttgtcaaaatgaatgaaacttgggttttttcatcagcgtgcgcggcctctttatcagaggccgtagattttctgcctttcagagtagactatcaagaaaagttttcctccgcggggaaaacctctggaggatttctgaaacgcgaaggtcgtccctccgagaaagaaattcttatttctcgactgatagatcgctctttgcgtccatcattccctaatagacttatgcaagacattcaagtcttgtcctacgtttggtcttatgacgggaaaactttaccagaccccttagctatttgtggagcttctgcagctttagctatctcagaggtccctcagaattgtattgttgcaggtgtacgcgtcggtctcgtcgaaggaaaatgggtagttaacccaactaaagatgagttagacgcatccaagcttgatctcgttatggcaggaacagcttctgcggtattaatgatcgaaggtcattgcgactttttgactgaagagcaagttttagaagctattgcttttggacaaaaatacatagctaaaatatgtgacgctattgaagcttggcagaaagcgattggtaaggaaaaacagctctcggctgtccttgatctgccggaagatgtgcaaaatgttgtttcgaattttattagagaaaaattcgaaaaagcactgtcttttagagatagagacgctttagaacaagtctcaaaagagttagaagaatctgttgtcgccaacttagttcaagaagaaagtgatttttctttattgaacgtgaaagctgcatttaagaatgcaaaatccaatcaaatgcgagctttaattagagatctcggcattcgcgtagacggacgaagtacaacagaaattcgccctatttccatagaagtctctttccttccacgaacacatggaagctgcctatttacccgtggagaaacacaaagtgtagctgtatgcacacttgggggtgaaagtatggcacaacgatttgaagacctaaatggggatggagcagcgcgcttttatttgcagtattttttccctcctttctctgtaggagaagttggtagaatcggatctccagggagacgcgaaataggtcacggaaaattagctgaaaaagctttaagtcatgtccttcctgaagcatctcgattcccttacactgttcgagtggagtctaatattacagaatccaatgggtcttcttctatggcttctgtatgtgggggctgtctttctctgatggatgcaggagtgcctatcaaagctcctgtagccggcattgctatgggtctaatcctagatcaagataaggctattgtcctttctgatatttcagggatagaagatcatctcggcgatatggattttaaagtcgcgggaactgaagaaggaatcacagcattccaaatggacattaaagtagaaggaattacccatgagatcatggagcaggcgttggcccaagctaagcaaggtcgaagccatatcctaaatcttatgacacaggtaatgtcttctcctaatgattctgtttccagatatgctcctcgtattgaaactatgcaaatcaatacttcaaaaatcgcgacagtaataggtcctggagggaaacagatccgtcaaattattgagcgatcaggagctcaagttgacattaacgataacgggctcattaacatatcagctaacacccaagaatctatcgataaagctaaggagcttattgagggattaacgggagaagttgaggttggcaagatctataacggccgagtcacttccgttgtggcctttggagcatttgtagaagtccttcctggtaaagagggtctttgtcatatttcagaattgtctaaacaaaaagtagacaatgtagctgatttcgtaaaagaaggtgatcgcctagcggttaagttgctcagcatcaatgagaaggggcaactaaaacttagccataaagcaactttagaatag

SEQ ID NO: 35 - DNA, 279 bp, Chlamydia muridarum
atgaaaaataaaatttttgagttacttaatcacctatattctaagcaggaaaaacggctaatgactctgggtactagcatggttcccgaattgacaacagaagatcttttacagccgatggattatgatgaactcgaggggaacccttcttttagatttgaagagggggttttgagtgggataggagaggttagagccgctctttattcctttttttctgaccaagaagactccatgcgtgaggagttttctagcgatatatccctctgtaaggattag

SEQ ID NO: 36 - DNA, 1806 bp, Chlamydia muridarum
atgaaaatgaataggattttgctactgctgctaaccttttcttccgctatacattctcctttgcatggggaaagtttagtctgtcagaatgctctgaaagatttgagttttttggagcatttgctgcaagtcaagtatgcccctaaaacttggaaagaacagtatttaggttgggatctttctaaaagctctgtttttgcagagcagaaattgcgttccgaggacaacccttcaacaagcttttgtcagcaagtaattgcggactttattggagcgttgagtgattttcatgccggggtctctttctttgctgtagagagtgcctaccttccctactctgtacaaaaaagtagcgatggacgcttctatttcgttgatgtaatgaccttttcttctgatattcgcgtcggggatgagttacttgaggtagacgggcagcctgttgcagaagcacttgctaccctatatggaaccaatcacaaggggactctcgctgaagaatctgctgctttaagaacgttattttctcgtatggcttctttaggacataaagtcccttccgggagaatcaccctcaaagttcgtcgttcttctggttctgtgaaagatgtgcgagcaaaatggcgttatactccagaaagtgtaggggatttagctacgatagctccttccataaaagctccacagctgcagaagtctatgagaggggcctttcctaaaaaagaaagtgtatttcatcagtcgagcactctgttttattctccaatggttcctcatttttggtcggagtttcgtaatcactacgcaacgagtggtttaaaaagtgggtacaatattggggataccgatggatttttcccagtcatgggacccgttatttgggagtcggacggaatttttcatgcttatattttccccttggttgatgaaaatggtagaagccataacgtaggatttatcagaattcctacgtatggttggcaagagatggaagatttagattctatagggacacctccttgggaagagtttggtaagatcattacgctattttctgaaaaaacagaggctttgatcattgaccaaacgaataatcctggggggagcgttatgtatttatacggattgctctctatgttgacggataaacctttagatcttcctaaacatagaatgattctaactcaggacgaagtagttgatgctttagattggttgaatttattggaaaatgtggatacaaacgcagaggctcggattgctttgggagataatatggaaggatatcccattgacttgcaggctgctgaatatctgaaaagctttgctcatcaggtattggcatgttggaagaatggagatatcgaattatctacaccgattcctctttttgggtttgagaaaattcatccacatcctcgagtccaatatactaagcctatttgtgttttgattaatgaacaggatttttcttgtgcggatttcttccctgctattctgaaagacaatgacagagcccttgtcgttggaactcgaacagcgggagctgggggatttgtcttcaatgtacaattccctaacagaacgggaattaaaagttgctctttaacaggatctttagcagttagagagcatggggatttgattgaaaatgttggggttgaacctcatattgaaattcctttcacagctaatgatattcgttatagagggtattctgaatatattcagaaagtacaaaaattggttgctcagctaatcaataatgacagtgtaattattctctcagaggatggaagtttttaa

SEQ ID NO: 37 - DNA, 1473 bp, Chlamydia muridarum
gtgatacaaacttctgcaactatggatacctcttctcctttttccagtgtgtcagcaaatccttctttcaaaggagacctagaaaatttatcccaaaacactgttcaagaaagaggagtattgaaaacaaccataggagatgtcactctgtctcaatctattgaagaggggtgtaacgaatctctgatctccttgttaggaatcgctagcatttatgcagctcaggagggactccttcccccagctttccaacacaacctcattttccttcctcctgaaacagtcgatctggaaattcaaattgcagaacttgtacaagatttggaaaaaactccctcttccgacacccctctttctttgcaaaagagcacagtttctccgaatcgtcccaatccgacaacaaaatcttccatattttctttacaaacgaaggcatcatcacagtcccttccttccctctcttctaaagagccatctactcaacctttagcccgcccccttgctatgcaaggacaaccctctctattttcacattcagagcaaaacatagttagagctgttccttcgtctatcgttcctcataaccgagctaatccaacttcctctcaaaactcttctaacgataatacacgctctcaccaatctgggctctcaacgggaataacgttcttttctcaaaaggaacaggatctatctggacaaacaaacaaaactggttcaacagaaaaagaaaaacaagagggccgtcaaagggaaaactctgaccgagagcgcaacggagatgattcttatcaggaagatgatcaatcagaaaacataaagatatcgtcggagagaaaaaataagaacaaaacgtcatcgaatcaggaaaatgagaatcttgaagaggctttctccgtttcctactttgcctataactccactccaaaccaaaaatctagtcaaagtactttccggaaaaggcctccttcccccatgtcattattttcttctcaaaattctgtggaatccctcccaaaaaaatctcctcgaatcgaaaacgttttcacccgtttcatggagcttatggccagaattttaggccaagcagaggccgaggcaaacaagctctatgcacgcgttaaggaacgtacagataatgttgattcacttactctgctattgtcaaaaattaacaatgagaaaggagccattgactgggatcaaaatgcagaaatgcgcgctcttgttgatcatgcaaaaaacttaggagtctcgattggagactcgtataactggtccgaagatgaaaaaaaacttttgaaagaaaacatccagatgttcaaagaaaatatggagaaaattactcaattagaacgaacagacatgcaacggcttctccaagaagtctctcaatgccatcaaacaagatctaatgttttgaaactcttgaaggaacttatggacacttttgtccacaacttgcgtccctaa

SEQ ID NO: 38 - DNA, 1008 bp, Chlamydia muridarum
atgaacataacgaataacccaccaccaaccacttcttccttggctccctttataacctcagactctagcaatctttccaccaccccccaatcttttaaagaggcttctttagtggacaaggttattagagtattgttggttctcttccttattatattctcttgcggactcatcctctgtgcgtactcattccgagatcttttagacatagacaccgcaacgcaagccccttctggacctgcagatagactcctagctcatgttgaggatgctttatctggtcctgttcctacttgggataatgaacacctattccaacactcttgcctaatgtacgaaaaatacggaaccgttctcccattgaatatcttcgccccacttactaaattcaattgtgtcgaacatatttgtaactgcctacttgccaaacaaatcctcgaacaatgtggagaatgtgatcttccttgtcctcctacctgtacaccagaaaattactaccaacttttaagagaagcctgtgtcttcccattcatcttatggcatgatcctcacgcacatacacaagaagctatgttagcaaaaatggaacaaaacatacgctctggacgagttggaaatagccactgggcattaatcattgtagatatatgccgaagatgtgtcacatattttgatagcctttacgactttgtatggcatcctgaacaaacccaagcacaactaaacgagctagcttctgctctcgggaatatctatccagaaggagaatctaatactcctttccaaacctgcatcggatcaacattccaagtacaacccctaggagaattaagctgtggtgtttggtgctgccaattcttagagtggtaccttgaaaatccggatttctctctcgaagataaagtccccgtaagcgtatgcgatagaaaatctatgctcactagattttgcgctgcatcccaagcatccatgtccaaatattccgctttaaactggccatcacattaa

SEQ ID NO: 39 - DNA, 1845 bp, Chlamydia muridarum
ttgttttattttttaggttggtttgttatgggcatcaagggagtaggcggtagcggtcatagcgattatccaatcccttctcataatggagatggggagagtgaaaaaaacagctcagattcaacaagtagtaaggttaatgcaaaagttacttcttccttacagggggctccgtcaacgaatgatgaaaattcagtttccccttattctgtggtggatgtcactgatttaatagagagcggagagtcttctaggcatgtaataaagaaatctatagaaacagaagaagctgctcatcgagaatctagtgtagagggggctgggcattcttctcgcggaatatttggacggttgcaagcaggattaggacgtctggctagaagagtgggggaagctgtcagaaatactgtaggctctatctttccacaaagagctggtgctgagcaaagaacaggcaaagctcggacaaaatattccccttcagcatcaagaggattacgcctcatgttcacagacttctggcgatatcgagttttgcatcggaatcctcctatggatggactttttgcaaagcttgatgccgatgaggctgaagatatggcagcttacacgaaagagtatgttagcaatctagaaaaacgaggagcagctgatcgagaaactatagaacactgtcaaatggtagctaaaaattgggaaaaaagagctagagatttgcgagacatgggggccgcaaaaaaatttttacgcgacccttttggtaagagtgatcctaagtataaggggacactgcctggagaatacactgtcggaaataccatgttttacgatggaccaggtgtgagcaaactatcagaggttgatacaggtttttggttggacatggagaagctctcggatgctgtcttgtctgcaaatattcaaaaagggcttcgagctcgatttgttttaaatcagtctattccacagttagagagtctagaagagcgttttagaaaactggagagtgcttgcgatgaggctcgtgcttcgttaaaggaagcaggttggataaaagaaggcaaggaacctaacaaagcgcaacgagcttttcggcgatttgtagaagaaagccggaatctagagctttcttttggtagttttggagaaagtgctcgtcgtctttccgctcgtgtttcccaaggtttagctgctgcaggggaggcaattcgccgctgctttgattgtcgcaaaggcaaatattcccttaaaaaggacttgtcttctgaagaattaaatttggcagaagagttaattaggtttactgatgagatggggatagagagagacccagatggaaattacaatattccttgggtagaaaactggagaacaggagttcctgttattgaaggagaaggggcagaacatatttatgaaacgatgatgcctgtccaggaatcttttgagcaggtttatgaagttatggatatgggattggaagagcgtagggattttgctgtgagtcaacaacactatcaagttcctcctagatcttcgttgaattacgagactccgcgattcagagaatatgacgttccacgtaattccgctcgttcttattacgatgttccaagagtacctccccaaaatgaggtagaagagatgcatgtgactaaaggaatgaggagttctgtgtatgcttgttttgtagcaggaatgcgcaactacattgtttcacagccacaagaacagattccaaattctgaacaggtggagcagcttttccaagagcttattaacgatggggatcagataattcaagagcttatgaagatatggaatgaggaactagataatcaataa

SEQ ID NO: 40 - DNA, 270 bp, Chlamydia muridarum
atgctttgtaaagtttgtagaggattatcctcccttattgttgttcttggagctataaatgctggaattttaggagcaactggttatagagtgaatattgttgctcgcctgcttggcgaaggcaccatgttaacacaagctgcctacgtagtggcaggaatcgctggggttatagccttcttaaacttctttaaatgctgctttaaaaaacgtcatagcgactgttgctcctctaaaggaggatgtcaccatcatacggacagagaataa

SEQ ID NO: 41 - DNA, 1257 bp, Chlamydia muridarum
atgatccctttcgtctcgtggatttcacataattggttacaaaaacttgtttctttaggttttgccattattatctgggtattagctaatcagtctatgactgtgacaaggacctttcataatattccagtacgcgtaattgatctatctccagaacaaacagtcattggcttgcaacccgatggcttgctaaagaaaaaagtagcactgatgataactgggaataagtcggttattgaaaaacttcgccccaccgacctagagattgtgattagtgctaaaggacgaaccgaaagttggatagaaactattgatccttataatttggtttgtttagatacagacattcgcctgcgccaaaatatcaaaaatttaacatctgaagatatttttattcgtctaactcaacttgttacggaagatattgctgtcactattacaaagcctatagggaaagcccctaaaggatatgaatatcttgatgtttggccaaagtacttagtacaaaaggtaagtggccctaaagaattcgtctcttctttgaaggatcaagggctaaatcttaccttcaatctcaatacagtttcttttgaagaactagacagtagtcgcctagctcaaggaaatcctgatgaaatagtataccatgttcctgaagattggaaaaaagtgtatatcccttttaataacagctatgtggaattaaatgatcctcgagcagattttttacggcttgttttcttaaaacaagagttcatccccctcaatatcaatcttcctgttcttttgtttttccctgtagaggacagtctatttataaatcctcaaaattattatcttgagcagaatcctccactggtcctgaatcatggaatttaccaattagaccttcctctctatgtaaaagatgtcagccatctatttctgaatgttgtaaagaataatattgctctcaccatcattatggaaccttccataaaatctcagaaagaacgcttcatccattgggctgtagaatttttagacgaaaaaaccttagaagatgcctttgttcaagcagtccttgctcaagaacgcgaaattactaaacatatgctcctggatgaagcaggaattcgacatcgctttagagaatacttgcgtaaacttacactatttgaccaaaatggagagcctttagctttgacagcgcgaacatcaggaaataaggttattattcaagtcgcttcttcctctttaaataaaaaatctgcctga

SEQ ID NO: 42 - DNA, 1341 bp, Chlamydia muridarum
gtgcgaacgttgtctatttctatgctcattcttgccctttcttgtggggaaaacacctgcttatgtgctgcggattcccccaaagcgaaagttgatgcttccatcggtaatggggcaagtttttctccatttacaggagaaatcaaaggaaatcgtgtgcgtctacgtctggctccacacacggatagttctatcatcaaagaattatctaaaggtgactgcctggctgttttaggagaaagcaaggactattatgtagtggctgctcctgaaggggttaggggttatgtgttccgcactttcgttttagataatgttattgaaggggagaaggttaacgttcgtttggaaccttcgacttccgcacctattttagcaagattatccaaaggaactgttgtgaaaaccttgggtgctgcgcaggggaaatgggtggaaattgctcttcctaagcagtgtgtcttctatgttgctaagaatttcgtcaaaaatgtgggtgctttagagctatacaatcagaaagaagggcagaagaaaatcgctttagacttgttaaattctgctatgagtttcgctgatgctgagttgcagaaaaaggtagaagacattgatctagatgccatttataagaaaatgaatctagctcaggcagaagagtttaaagatgttcccgggttacaacctttagtacagaaggctttggaaagagttcaggaagcttttcttgcaaagtccttggaaaagggctcacacaaaactgtagaatcctacaaacctgtggaaactcaagctcaattacagccacagcgtcaggttatagaagaaaagaatgtgtcggtggttccagaggcgccggttttgtcgcaagtagaagagccgaagagtgtcctaacttcctctagtgaagtagaacctttgcaggacgttggtcctataaaaggttcgctgttatctcattatattcgtaaaaagggatttgttaagacttctcctgtggtagaagggagagagagctttgaacgatctttgtttgaggtttgggtaaatcttcaacctgaagagattcgaaatggactgactatggagtctttctatagagatgagcagaagaaaaaacgggtgctgaccggggaacttgaggtatatcctcatatcgttaaaaataatccaggtgattatcttttgaaaaatggagaagatgtagtggcatttgtttacgccacgagtattgatttaagtaaatggctagggaaacgtgtggttttagaatgcgtttctaggccgaataatcactttgcctttcctgcctatattgttttgtcgataaaagagggcgcttga

SEQ ID NO: 43 - DNA, 1884 bp, Chlamydia muridarum
atgacgagcaattacatgagtcgcttatattccttgaataagagtcgtcgcattcttcattcctcctataaattgctgaaaaataagaaaatgctctcttatcctgatactcagaaggaattacttgaaatcttaaaacagcttgaagaagccattttggatcaaaatagagaagacgcctctcttttcgctaaacaagctcaagctattcaaaaacgattccctcggtcaaaaatacaggcaacttttgatctcatctatgctttagcatttgctgcagttcttgcttttttaattcgtcaattctggtttgaactatatgaagttcctacaggatcaatgcgacctacaatccttgaacaagatcggattctggtctctaaaactacatttggacttcgcctgccttttagtaatgaaagtattggctatacaccggagactattacccgaggagaacttgttgtctttaccgttggagaccttcccatcccgaacgctgacaccaaatatttcggaattatacctgggaaaaaacgttatataaagcggtgcatgggcaaacctggagacactttatacttttatggggggaaaatttatggaatagatcgtaatggcgtccctatcaccacaaaaaatacagaaaacctttatcacatcccctatatctcttttgatggcgttacagaaatcgttaatcattcagatgatcaaactgatgtgatctttaaccaattccatactccctgtgggaaaatttccttcccccactattctcatgggcaatttttctacaaagatgcttggcacaaagacaccccctatgctttaaaagaccttcataccgagcctttaagctatgcagacctatttggcataaaaaattttgcaatggtgcgtattcttacaaaaaaacaagctgcgcttactcacgtactttcttctcctttagcagatgcctacttagaaattgcacatactcctaatgtctcttatcctcatccgcatttgcgtccgttagaaacgcaacttatccccactattgagcctatgaaaactctccttcctctaaggaaggagcacatgcatttgatccgtaataaccttacaacatctcgtttcacagttattgatggatatgcctacaaatatcaacccactccaattaatacttctggcatagcaaaaatatttgctcttccaatgccaaacattccggatggctgttatgagttttctaaaggggatgtgtttaaaattagtataggaggtttccgcactaaactgaaacaaccccatcctttgacgcaattgagccattctcagattattgatttattcaactgcggcattagttttcatacagtctatatccccaaaaatcctcaatacgccccttttcctaatcgttatgcttttttcaatcagggaaacctatttgttatggattccccagttttcattgacagtgatccttcattacaaaaatttatcttggcggaaaaagaaaaggagcttcagtcctctgaagaaaaaccctacattgccttcattgatcgaggacctccccctgaatctgcagaagaatttacttcttttattacaaattttggacttaaaataccggaagggcatgtgctcgttttaggagataattgtcctatgagtgcagacagccgtgattttgggttcgttcccgtagaaaaccttttaggatccccggtagctattttttggcctattaaccgtataggatcattatcttctagtatcaccccgttgagcttacctggttatcttgttaatggattagccttaggagctcttatttactttgtgggtgcgtggtattatcgaaagaatcacaggttattcccctaa

SEQ ID NO: 44 - DNA, 573 bp, Chlamydia muridarum
atggggattaaagaagacaactggattcgcaaaatggcaattgaagagggtatgatagagccatttgctgataatcaagtaaaagtacatccagaaactggagaaaaactcattagttatggcttgtccagttacggatatgatttacgtatctctagagaatttaaagtctttaccaatatatacaattccctagttgatccgaaatgtttcacagaagacgctttgatttccatcgtggatgatgtttgtattattcctcctaattcttttgccttggctcgcagcgtagaatatttccgaatccctcgcaatgttcttaccgtttgcataggaaaatcgacttatgcacgctgtggacttattgtaaacgtcaccccctttgaacccgaatgggaaggatatgtgaccatcgaaatttctaataccactccactacctgcaaaaatttatgctaatgagggaattgctcaagttcttttctttgaaggagactccgcatgtgatgtttcttacgcagatcgccaagggaaatatcaaaaacaacaaggcattacagttccttttgtgtaa

SEQ ID NO: 45 - DNA, 447 bp, Chlamydia muridarum
atgaaaagtgagcgtttaaaaaaattagaatcagagcttcatgaccttacccagtggatgcaacttggcctcgtccccaaaaaagaaattgagagacaccaagaagagatccgtcttctagagagcaagatcttagaagagaaagagcgcctacaacttctgaaggaaagcggtgagatcaaagaatatgtaactccccgtagaagtcctgctaaaacaatttaccctgatggccctagcgtttcggatgtggagtttgtggaatcttcggatacagaggtcgatctcgatactagtgaaactattgagattgatttaggcgaggaaggaggagaagagagcggaagtgaactcgattattccagcgaagacgatgaagatcctttcagtgatcgcaatcgttggcgccgaggaggcatcatagatccagacgcaaatgaatggtaa

SEQ ID NO: 46 - DNA, 1125 bp, Chlamydia muridarum
atgtgtactctgatatccgcaatgcggaattttttacctcctgattgcaaacttcctactttgacttacaaacaggcccttattacttccctcgcatcggggataattttaggacttgctggttgtttggttggaatcctctcttctatcacttctctgattatcgtttctggttttattttaggagttagtcttctcattgcagggattcttctttcccagcgtttttgttctcaagacaacgtattaaaacctgaaattccagaacaggaaattccagagctggagatcccagaatttgaaattcctgaactcgagctcctagaaccaagtacccctcccccatcttttatccccccaaaaccacccttactccctaaactagctttaaaaaataccataaaagaaatgttatttggctggaacagtatagaatctgaaaaactgcttccctgttttctttcttcagacaaaattcttttatcttttaacaacccctcagctcgattcagagcatggaatatccccggatcaaatacactattcattactacctctggacaatatgcttccctaaagcttcaatccaatttgccttcggcaattgcaaattctgtacaatccatatcttgccctaaaggtggacgaggaactaatgatttattttctgcagtgattactgatagatgctgggaagaatctaaaccaagttcgggcctcttacttccaggagaatgctcttccgcaccttgggaagacaatgacgttcaatcccccacttggaattttgaaactcaaacttataataaacccactcgctttatccaaatttcggctcctaaagcctctatgtattccaatagccctgcttattgttatcaactttgctttaaagcctatttgtcctgctttaaagaggctatccgccatggctgtcacatcattcaaattcctctcatagcctctttcccagacttccttccaggctcccaacacaaagaaaaagtctggatcgattcaactaaactagccttgctccatgctatcgcaataattgctcaccaacatcgatcagataatatagtgattgttttaacgagcatcccaagacctatttatttctaa

SEQ ID NO: 47 - DNA, 1590 bp, Chlamydia muridarum
atgactcaaaccgcggaaaaaccttttggaaaattgcgctctttcctttggccgatacacatgcatgagctaaagaaagttctgccaatgttcctaatgttcttctgtatttcattcaattacacgattttgagagatacaaaagacactcttatcgtcacagcaccaggctctggagcagaagccattccctttattaagttgtggctggttgttccttctgctgttgtgttcatgcttatctacgcaaagttaagcaatattttgagcaaacaggctcttttctatgcagtgctctctccattcgttgtgttttttgcactgttccctttggtgatttacccatatcgtcatatacttcacccaacagacttcgctgatacactacaggccattctcccttctgggttcttaggcttcattgcgatgctacgcaactggacttttgcagcgttttatgttctttccgaactttggggaagtgtaatgctttcgctaatgttctggggatttgcaaatgaaatcactaaaattagcgaagctaaacgtttctacgctcttttcggagttggagctaacgtagctctcttaatttccggtccagctattgtttggtcttctaaattacgcgcaagcttaggtgaaggcgtagacccatggggagttactctttacttcttaatggctatgttcctgtgttcttgtgccattatcgctgcctgctactggtggatgaatcgttacgttcttactgatcctagattctataacccagcagagctaaaagctaaaaaatctaaacctaagatgagcatgggcgagagcttctcttatctgttaagatccccttacatgcttcttctagccttgctagttatttgctacggagtttgcatcaaccttgttgaagtaacttggaagagccagctcaaaatgcaattccctaatccaaatgaatacagcgcattcatgggaacattctctttctggacaggggttgtatccgtattcgttatgctgttcattggtggtaatgttatccgtcgttttggctggttaacaggcgccttagttacacctgtcatggtcctcgtaacaggagcgatcttctttgctctcgttatcttcagagatcatgcaacaggattggttgcagctttgggaacaactcctttaatgctagcggttgttgttggagccgtccaaaatattctttccaaatcgactaaatatgctctctttgatgcaactaaagagatggcttacatcccattggatcaagagcaaaaagttaaaggaaaagccgctattgacgttgttgctgctagatttggtaaatctgggggatctttgatccaacaaggactcctagttgtttgcggaagcatcagtgcgatgactccattcctagcggtagctctctttgcaattattatggtttggttaacatctgcaaccaaacttaataaattgttcttagctgcttcagctgctaaagaacaagagctggcagaggccacagcagcagctgagaaggaagcttctcctgcagcgaaagaagtctctcctgctatagagggtgtttcctaa

SEQ ID NO: 48 - DNA, 477 bp, Chlamydia muridarum
atggctacggcacagattactatccaagaagaaatagagcagctcataactaaagcgattagcaaagttggaggaagtaaagaaaatgatctttgtcgttatctcccaggaccaacaggcggatacatgcatcatttcactttgaaaaaaatgaaacattccgctccagaacaactcttgaaaatgttgaagacatttgtaatagattccatgactcccagatctattaatcccaaaccaagagctccacgaggttctaaaaaacgaaaagattttgtgaatttcacgaaaacagatattgaacgcgttttagagctcgctcgtcaagttggcgacaaagatctcctagctcggtttagtcctaaaaaaccgcttccttctctaaaacgagaactcattcgctctatccgcaataatattgtaagtacagagctttggaatgcctatgtggaagcgctttctcaacctaccgaataa

SEQ ID NO: 49 - DNA, 981 bp, Chlamydia muridarum
atgttttttttgcatgttagaaaatataagcatgttattgggggactcttgtgtttagcaggttgttttgtaataagtagctgttcctctggcagaggaaacaaatctatcgatgaaagaattcacattttgtctatgaatcgcatgatttatgattgcgtttcgcgcataacaggagatcgagtcaaaaatatcgttctgattgatggatctatagatccacattcctatgagatggtcaaaggtgatgaagatagaatggctataagccagctgattttttgtaatggcttaggtctggagcattcagctagtttgcgaaaacatttggaggggaactctaaagttatcgatttgggggctcgattgttagataagaattgttttgtccttttaagtgaagatgggttccctgatccccatatctggacagatatgggtgtatggatttcgyctgtaaaagaaatggcttcagtgttggttcaacaaattcctcagtatgcggaagaatttcaaaaaaacgcggaacaaattctttctgaaatggaagatctggaccgctgggccgtacgttctctcgctaccattccagaaaagaatcgttatttagtcacggggcataatgcgttcagctattttactcgacggtacctatcttctgatgaagaaagggaatctgggaattggaaattgcgttgcatgtctcccgaaggcttgtctccagaagctcaaattagtattcgggatattatgcgtgtagtggagtatatatgtgcaaatgatgtgggggttgtcttcttagaggatactttaaaccaggatgctttaagaaagattgtcagttgctcgaaaagtgggcaaaaaattcgtttagctaagtctcctttgtatagtgataatgtttgtgataattattttaacactttccagcataatgtccgtaccatcacggaagaactaggaggaactgttcttgaatag

SEQ ID NO: 50 - DNA, 1860 bp, Chlamydia muridarum
atgacagtaatatattttgttcttgcagccctggccttaggctttctgattttaattcatgaactaggccatttgttagcagcgaaagctgtaggaatgactgtagaaagtttcagtatagggtttggacctgcacttgttcgaaaaaaaatggggagtattgaataccggataggggcaattccttttggaggatatgttcgtatcaaaggtatggacagaaatgataaagaaatatctgaagacagggagaaaacggtttatgatatccctggaggattttttagtaagtctccatggaaacgtatcttcgttttagctgcaggtcctctagctaatatactggtggccctatttgctttcgggattctctatttttctggaggaagaacaaaacctttttctgaacacaccagtattgttgggtgggctcatccttctttggagcaaaagggattacgtccaggggatcgtattttcttgtgtaatgggcaggtctactctgggaataagatggcgttttcgtcttctttgcttgatagaaaattatcattgcaaggggagcatcctgcttacttctctgaagcggagtcattttctctagacgtaccatttaatcctagcttagaaggagtcccttgtttaggggctagctatttactgtatcgtggttctgagcctttgcctgaaaaatctcctttgatagatgcaggattatctgaaggggatcgtctagtatggatggacggtgctttggtattttctggcgtgcaggtttctcaaattctcaatgagaaaaaagcttttttgcgaatcgaacgtcagggaaagatcgtattcgttcgtcaatctagggttttggcgggggatcttcagctcacttcatattttaagaatgagctgattgattgtcagtatgaggcggggcttaaaggaaaatgggcttctctatacatgttgccttacattattaatagtgatggttttgttgaaagtaagatcaatctgctaaacacggatcagcagtccttagattatcatctggagttaggagatagaattgttgctgtagatggaattcctgttatgagcaatgcagatattttgcgtcttgttcaagatcacagggtttctttgatttttcagaggatgtcttcgggacagctctctgttttggatcaaaaagctgcagacaaagcatttattgattcctatgatatggacgatcttctgcgtgttgcagggtctgtaggagaagaacgggaggtatctcacttaggagagtatcgtctggtaactcgagtacagcctaagccatgggtgcatatttattctgaagaattattagataaacagcgtgcccttgcgtctaaattccgagatgagcaagagaagcgctattacttagaaagaatagaatccgaaaaacagcgcatttctttgggcattccccttaaggatctcgctgtgcagtataatccagctcccttagttttgatgggagaatccatttctgatagcttaaggactgtaaaggccttaggatctggccggctgagtcctcaatggctttcagggcctgtgggaattgtccgtattctacatacaggatggtctatggggattcccgaggctctatcttggatcggattgatcagcataaacctagcagtattgaatctcctccctataccggttttggatgggggttatatacttttatgcttatgggagagcgtttctagacgtcggttaaatatgcgactcattgaaaaaggactagtcccatttatgattctgctgatcttattttttgtgttcttgaccctccaggatctttccagagttttcattggatga

SEQ ID NO: 51 - DNA, 1020 bp, Chlamydia muridarum
ttgccaagctattacccctgtccctggtggggtgggccccatgaccgttgccatgctaatgagaaatacatgggaaagttttttacgccatacgctttgatcatattcgttttcttgattcaagcctgctcttctccttcaaaaactatttttgaaggtgtccgcatgacaattccttaccgagtcgtgctcggggaaactctttccttttctcaaaaaaaacaagctcaaaaggaaatcgatcaaatatttgatcacattgaccaaatatttaataattggaatcctttctctgaaatttcgcgcattaatcgttctgaaactcttgaacccatttccctatctccagaactcttctcttttttatgtgaaatagatcgattccataccttttcagacggacgttttgatcctaccttaggagctttaaaaaacttatggctgcttcacttaaaatcacagactctcccccctcaagaactacttcactcgtataagcaaaacactggatggcatctactttctcttgataagaccaatcacacgctaaaaaaactgtctccttcagtccaattagatctctgtggagctgtaaaaggattcgctgtagatctgttaggaatattttgttcccaattttgtcaaaattattacgtggaatggggtggagaaatcaagacatcaggaaagcacccttctggtaggtcttgggccatagcatcatcagcaacgccagaaattcttcatctcaataatagctccatagcaactagtggaaaccaataccaacgttggtatgtaaataaaaaaatttacactcatattttggatcctttaacaggaattcctctagaagagagtagctatcctatcttagcagtatctgtaatcgatgaaaattgtgcttttgcagatgctatggctacagcattaactaccttcacctctaagcaagaagctcttgattgggcaaaaaagaaacatctttgtgtctatattaccgataagaacgcttcatag

SEQ ID NO: 52 - DNA, 474 bp, Chlamydia muridarum
ttgtcacgcgcgacattgttctctgtctctttggcaagttttctcttgtttccacgctattttcctgaatggcggcccgtatattttgcacctttggtcgttactactttttattcccatcctaaagaacgcgttcttctttgggctatgctttcaggtcttctttgcgatatgggatccacttgttttatgggcattcaagcctttctttatgtgagcacagctcttatcctttacaaaacacaaaagttctttataaaggagcgttggatctcacttcctttgatcagcgctctgtttgctctaaccttctatttgctctcctacccagttctcgcgtttttcaatcaccccctttgtctgtgcggaacagcccttctagctgatttacaacatgtgatcttagtagaccttccttatggagcatttctcagccttctgacccataaaacaccttttactccacagatctaa

SEQ ID NO: 53 - DNA, 402 bp, Chlamydia muridarum
atgcattttgaacgaaactataaaataaatagaaacacatctttattaactaaatattgtgcatcgattgatataaatcgcttcatcttttatattccgaaaatattcataataactctgttgaggctcttattcctcttactaaggttcctttcccgactatcttcggaatcttttctgaaaatttgtcacgcgcgacattgttctctgtctctttggcaagttttctcttgtttccacgctattttcctgaatggcggcccgtatattttgcacctttggtcgttactactttttattcccatcctaaagaacgcgttcttctttgggctatgctttcaggtcttctttgcgatatgggatccacttgttttatgggcattcaagcctttctttatgtga

SEQ ID NO: 54 - DNA, 1305 bp, Chlamydia muridarum
atgaacaaggatcttgtggctatttttgactacatggaaagagagaaaggtattcaacgctctacaatagtaggagctattgaatccgctctgaaaattgctgcgaaaaagactcttagagatgacgcgaatgtgtccgtgagtatcaatcctcgcaccggagacatagaagttttttgtgaaaaacagatcgttgaaaaatgccaaaatccaagtaaggaaattcccttagataaagcccgtgaatatgatccagattgtcaaatcgggcaatatatggatgttccttttgtctctgatcaatttggaagaattgcagctcatgcagctcgccaaattatcggtcagaaacttcgtcatgccgaacgcgatgtaatttatgaagagtatcgccatcgaaaaaatgaaatcatttcgggggtgattaaaagtttctctcgcggatcaaacttagtggttgatttggggaaagtagaggggttacttcccgctcgcttttatcctaaaacggaaaaacataaagtaggcgataagatttatgcgcttctttacgaagtacaggaatctgaaaatggcggagctgaagttattctcagtagaagtcacccagaatttgtaaaacaattattcatgcaagaagtcccagaattagaagaagggtctgttgagattgtgaaaattgcaagagaagctggctatcgaacaaaaatggcagtgcgctcttcttcccctcaaacagatgctgtaggggcttttgtaggtatgcgtggctctcgcatcaaaaacatcattcgagaattaaatgacgaaaaaatagacgttgtaaattattcccctgtatcgacagaattgttacaaaatttgctctatcctgtagagattcaaaagatcgctattttagaagacgataaagttatcgctattatcgtccaagattcggactatgcaactgttattggtaaacggggtatcaatgctcgtctaatcagtcaaattttgggctatgaacttgaagtccaaagaatgagtgaatacaacaagctattagaaattcaacgcttacagctagctgaattcgaagatcctcgattggatcagcctttagaagtggaaggaattaatacgttaatagtgcagaacttagagcacgcaggatacgacacgattaggaaaatattgctggctagtgctagcgaattggcttctgttccaggaattagtttagagttagcttacaaaatcctcgaacaggtcagcaaatatggagcatgcaaagttgacgaaaaacctaaagttgaagattaa

SEQ ID NO: 55 - DNA, 1611 bp, Chlamydia muridarum
atgcatggcttcaccgcgacagaagaagaacccactagcgaagtacagcctggtgcgatcctaaaaggtacagttgtcgacataagcaaagattttgtcgtggttgacgttggattaaaatctgaaggagtcatcccgatgtcggagtttattgactcttcagaaggtttgtccgtcggagctgaggttgaagtttatttggaccaaactgaagacgaagaaggaaaggtcgtcctgtccagagaaaaggcaacaagacaacgtcaatgggaatacattcttgctcattgtgaagaaggctcgattgttaaaggacaaatcactcgaaaagtcaaaggtggcttaattgttgatattggtatggaagctttccttccagggtctcaaatcgacaataaaaaaattaaaaacttggatgactacgtagggaaagtttgtgaattcaagattctcaaaattaacgtagatcgcagaaatgttgttgtgtctagaagagaacttctggaagctgaacgcatttctaagaaagctgagttgattgagcaaatcacaatcggagaacgtcgtaaaggtatcgtcaaaaacattactgactttggagttttcttagatctcgatggtatcgatgggctgcttcatatcacagatatgacatggaaacgtatccgtcacccttctgaaatggttgaactcaaccaagaattggaagtaatcatcctcagcgtggataaagagaaaggtcgtgtagctcttggtctgaagcaaaaagaacacaatccttgggaagatatcgagaagaaataccctccaggaaaacgtgttcgtggaaaaattgttaaacttctcccttatggagcatttattgaaattgaggaaggtattgaaggcctcattcacgtttcagagatgtcttgggttaaaaacatcgttgatcctaacgaagttgtaaataaaggtgatgaggtcgaagtagtcgttctctctattcaaaaagatgaagggaaaatttctctcggcttgaaacaaacagaacataatccttgggataatattgaagaaaaatatcctattggattgcgtgtgacagcagaaattaaaaatctaacaaattatggagctttcgttgaattagagcccggaatcgaaggattaattcacatttctgatatgagttggattaaaaaggtttctcatccttccgaacttttcaaaaaaggaaatactgtcgaggctgttattttgtccgtagacaaggaaagtaaaaaaatcactttaggcgtaaaacaattgactcctaatccatgggatgagattgaagctatgttccctgtcggaagcgatatctccggtatagtaactaaaattacagctttcggagctttcgttgaattgcaaaatggtatcgaaggactgattcacgtatccaaactttctgataaaccttttgctaaaattgaagatattctctctatcggagacaaggtttctgctaaggttatcaagctagatcctgatcacaagaaagtttctctttccattaaagagttccttgctcatggaggacatgctggtcaagatgcagaagaagaaacatcttctaacagagactag

SEQ ID NO: 56 - DNA, 897 bp, Chlamydia muridarum
atgttgaaaattgatttaacaggaaaaattgcgttcatagcaggtataggtgacgacaatggatatggctggggcattgctaaaatgttagcggaagccggcgccaccattcttgtgggcacttgggttcctatttacaaaattttctcccaatcctgggaactaggaaaacttaatgaatctcgcaaattatcaaatggagagctgcttactcttgctaaaatctatccaatggatgccagtttcgacaccccagaagatgtccctcaagatatcttagaaaataaacgctacaaagacctttctggctatactgtatccgaagtggtagagcaggtaaaaaaagatttcgggcatatcgatatccttgtccattctcttgcgaatagccccgaaattgccaaacctttacttgatacttcacgcaaggggtatcttgcagctctaagcacatctagctattcctttattagccttctttcccatttcggacccattatgaatgaaggcgccagcacaatctctttgacatatctcgcttctatgcgtgctgttcctggatatggtggcgggatgagcgctgcaaaagctgctttagagagtgacacaaaggtattggcttgggaagctggtagacgttggggaattcgcgtaaataccatttcggcaggacctttggccagccgagctggaaaagcgattggatttattgagcggatggtggattactatcttgattgggcgccactaccatctccaatggaagctgaacaagtgggcgccgcggcggcattccttgtttctcctttagctaatgccattacaggagaaactttatatgtagaccacggagccaacattatgggcataggtccagaaatgcttcctaaggattaa

SEQ ID NO: 57 - DNA, 1953 bp, Chlamydia muridarum
atgtcgttaggtattagtggcatttgttcttctttatggtctcgcctttttgggagttctcagaattttaatgttacagaggttgatgaagagcccatctctttggagtcaaatttctctgtacacactcaaccggatcctattaattcggtatgcgggcagctcccatgcaattttttgatggctgcccaggctcctaatgtgcaggggcttatttttcatgatcatggaagggagatttttggtagaaggtctcaggacaggtactcttcttcaggttttgctctaacttctatctcccttagaagtggcgattgtattgatagtccctcctccgaatctgtgatcgatcaacagcctcggcttggatcctcttcttctcagcatcgttcactacagttggctgcgatgctttctggcatgagctccttttcttctaagaacatttttagcttatttggagaagatcgtattcgctctttcacagaagtggatagtccatcaacagcttcattatctcagttaagaggcttattgaaagatgcaaacgtgtcagataccgtgtctttattgctcggattaaatggtatagagacttcggacatgtcttctccgctcgttaacttgttacttagtcagtataatctttctggagcagcgaataacaagaatttgaatgatcttgttgaacttttgcagaaggtgcaaaacaaagaaagttctgttgatgaagcttcaacgcaaagttgtttgagagtatgttgctccactgtttgcgggctgttagctagttcccctaatccgattgttagtggtattggtataggaggaacagcattaacagagcttcttgtaatggcagcaaaaagtcaacgggttcaaaaaagcttagagttgtgccacgattcttgtaaaccttgttgcactagatcttgcgggtgttcttcttgtggttgtgatggaggagaatgtggttgtggtagatttggaagtctcttatgtggttgcacagagttatggtgtttcaaagagtctgttagagaagaggttgatttaaaagattatgctaataagattcagcaattagaatctgctgtagggtccacaacgtttatgatgggattacagaatttagggattaccatctcagatttattgaacggcgatgttaaaaatattccttctccagaacaactagaaaatgcttgtaaagaggcggtatccactattgggcaattgatgatgcgtatgactcaagagaaatggatgaatcgtttttgctcttgtatgacgatactaaatcaatctttctggaaaggagctatttgttctggattatcgggaagaacaactatgctatctctagaggatctggccaatcgtgttaaaattgttacatgcactggaggcaaacaagaagctgagaattttaatcccgcattactgcttccagccttgtcatgtttgcagataaaaggaatggaggaagataacgaaaataacgaaggaaatggtttaagtgctgatcagaaaaccttacttctttgtaagctttgttcggttctttcctccgcagtagggaatgacagaaaacctatttggttaacgcctaaacaattaactgaaatcgtctgtgtttgcatgattatgtgcggaatttcaatagaaggaggtccgtctagcgaaagcgaagagtgtaaagagttccgagattgtattttacaagagagtttagattgtttgcgagatcggttacgatgttcattgcgtacaacaagcaaaactcgtagagatattcgtaagctagttgtagtccatgaatcacaaaatgcctttatagagttacttttagctttaaaagatcctgatagtagagagagtaaaggccttttaagagagtgtttctcctcctgggcaactaaagcaggagtggtaaaggttactgaggcttaa

SEQ ID NO: 58 - DNA, 756 bp, Chlamydia muridarum
atgaatgttgctgatcttttgcatgttttgaatgaattattatatcctgaattgtttaatgattatggccctaacgggttgcaggttggggatgcgcaggcaccagtccgtaaaatagctgttgcagtgactgcagatttagcaactattgagaaggctattgcttgtgaatcgaatgttttgcttgtgcatcacgggttattttggaaaggaatgccttatcctatcacagggatgctttatcaaagaatgcagcgtcttattgagaacaatattcagttaatagcttatcatctgcctttagatgcgcatccagaagttgggaataattggaaagtggctaaagatttaggatgggagcgattagaatcttttgggagcacgaaaccgtctttaggtgtaaaaggggtgttcccagaaataggcattcatgactttgtgtctcaattatcctcctattatcaagctccagtattagctaaagcccttggaggaaaggaaagtatttcttctgcagcattgatttctggcggagcttataaagaaatttctgaagctaagagtcaggaagtagattgctttatcacaggaaacttcgatgagccagcatggtccttagcacatgaactagccattaacttcttagctttcggacacacagctactgaaaaggtcggaccaaaagccttgactcagtacttgaaacaagtgggatgtgattctgttgtatttttggatacagaaaatcctttttga

SEQ ID NO: 59 - DNA, 1635 bp, Chlamydia muridarum
atggtcgctaaaaatattaaatataacgaagaagccagaaaaaaaattcaaaaaggagttaagactctagctgaggctgtaaaagtcactctggggcctaaaggaagacatgttgtcatagacaaaagctttggttctcctcaagtaaccaaagacggagttactgttgcaaaagaagttgagctcgccgataagcatgaaaatatgggcgctcaaatggttaaagaagtcgctagtaaaactgctgacaaagctggggatggaaccacaacagccactgttcttgccgaagctatctatacagaagggttacgtaatgtaacagctggagcaaacccaatggacctcaaaagaggtatcgataaagctgttaaagtcgttgtagatcaaattaaaaaaattagcaaacccgttcaacatcacaaagaaattgctcaagtagccactatttctgcaaacaatgatgcagaaattggtaatcttattgcagaagcaatggaaaaagttggtaaaaacggatctattactgttgaagaagccaaaggattcgaaacagtcttagatgtcgttgagggaatgaatttcaatagaggatatctctctagctattttgcaacgaatccagaaactcaagaatgtgtattagaagacgctcttgttttgatttacgacaaaaaaatatctggaattaaagatttcctccctgttttacaacaagttgcggaatcaggccgtcctcttcttattatagcagaagacatcgagggagaagctttggcgacattggttgttaaccgaattcgcggaggattcagagtttgtgctgttaaagctcctgggtttggagatagaagaaaagctatgctggaagacatcgctattttaactggcggtcagcttatcagcgaagaattgggtatgaaattagaaaatgctagcttagcaatgcttggtaaagctaagaaagttatcgtttctaaagaagacacgactattgttgaaggaatgggcgaaaaagaagctttggacgctcgttgcgaaagcattaaaaaacaaattgaagacagcacttccgattacgacaaggaaaaactccaagaacgtcttgctaaactttctggcggcgtagcggtcatccgcgttggagcagcaacagaaatcgaaatgaaagagaaaaaggatcgtgtagacgatgctcaacatgccacaatcgctgctgttgaagaaggaattcttcctggcggtggaacagcattaattcgttgcattccaactcttgaagctttcttgcctatgttgacaaatgaagatgagcgaattggagcccgtattgttttgaaagctctctctgctcctttgaaacaaattgcagcaaatgcaggaaaagaaggtgctattatcttccaacaagtaatgtcccgttctgcaaatgaaggatacgatgctctacgtgatgcctatacagacatgatagaagctggtatcttggatcctgctaaggttactcgttccgctttggaaagtgcagcatctgtagctggtctactattgacaacagaagctctcattgcagaaattccagaagaaaaacctgctgcagctccagcaatgcctggtgcaggaatggattattaa

SEQ ID NO: 60 - DNA, 309 bp, Chlamydia muridarum
atgtcagatcaagcaacaaccctcaagattaaacctttgggagatagaattttagttaaaagagaagaagaagcttctactgcaagaggtggaatcattcttcctgatactgctaagaaaaaacaagacagagctgaagttttggctttaggaactggcaaaaaagatgataaagggcagcagcttccttttgaagttcaggttggcgacatcgttttaattgataagtattctggccaagaactcactgtcgaaggtgaagaatatgtcatcgttcaaatgagcgaagttatagcagtcctgcaataa

SEQ ID NO: 61 - DNA, 1827 bp, Chlamydia muridarum
atgacgactgatacaacttctcaaacagttttacgctctagaaaagatgttccttcttctgattgttgggataccaaaagtttatatgcaagccgtgaagcatggaaaaaagatttggaaaatttatgtggtaaagaagctccattttggccacatctcaacgaaaagcaattccatatagaacagccatcctctctttataagttacttaccgaagtcttttctattgaaagaaccttggaaaaactctatgtctacgcccatctcactcacgatgaggatatatccaaccaagaggctacagcagaccttaagtctatcacctatctacttacgtcattttcagaagaaatctcttggattcaaccggccctcattgctcttcctcaaaaaatttctgaagagctacttacttctcccgaactccaaacataccatttctacctaaaaaaaatatttcgtttagctcctcacacaggcacttctcgagaagaaaaaattttagcatcttcttctcctgcattagaagtagcctacaaaacgttttcaagcttgactgattctgaaattccgtttggagaagctgtggattccgaaggaaaatcccatcctctttcccatgctttgtcttctctttatatgcagtccccggatcgagaattacgaaaaagcgcttatcaaaaacaatgccaacgttaccatgggtatcgcctatctcttgcaaacttactgaacggaaaaattcaagcacatttgttcaacgcaaaggcccataattataaatcttgtttagaagctgctctatttcaaaacaatattagcacttcggtcgtcacgacactcattgagacagtcaagcaacatacacatctgataactaaatattttcagttaaaacaaaaagctctgggactaccagatttccatttttacgatgtctatgctccgatagcagctagcgaatttgctcgccactactcttacgaagaagccgtctctctaatttgtgatagcttaacccctttaggagataactacgtggaagctttacgcaaaggtctcacctctgaaggatgggtagataagtacgaaaaccaaaataaacgctctggcgcttattcttctggatgttatgacagcaagccttacatactcttaaattacactggaactctttatgatgtgtctgtggttgctcacgaaggcggtcatagcatgcactcatttttgagtcacaaacaccagcaataccatgaagcacaataccccatttttttggccgaaatcgcttcaacattaaatgaaactcttttgatggaatttttgctgaaaaatgctccgtctaaggaagagaaaattgccattctttcccggtctttagacaccatctttgcaactctgttccgacagactttgtttgcagattttgagttagaagctcattctgcagctgaacaaggaatccctttaacagaagaatttttctcccaaagctataagaagctacagcatatcttctatggcgattgtgtaacatttgacgaacttagctccattgaatgggctcgtattcctcatttttactacaatttctatgtctatcaatatgctacaggaatcattgcttctctatgtttttccgaaaaaattctttctaaagaagctggggctcaagaggcctatcttacatttttacagagtggagggtcagatttccctatcgaaattttgaaaaaatctggcttagatatgacttcatcggctcctatgctcaaagcattttcctatattgaacggaagttagacgaacttactaacctactataa

SEQ ID NO: 62 - DNA, 2604 bp, Chlamydia muridarum
atggagaagttttcagacgcggtcagcgaggccttagaaaaggcttttgagttagccaaagatgctaagcattcttatgtaacagaaaatcatttgctaaagagtcttttgcaaaacccaggttctttgttctgtttagttatcaaggatgtgcatgggaatctaggactattaacttctgctgtggatgacgctttgcatagagagccaactgtggttgagggtgcagctattcccaaaccatcgccaagtttacagcaattattgctaaacgctcaagaagaagctcgaagtatgggggatgaatatctctctggagatcacttgttattagctttttggaaaactaccaaagagccttttgcttcatggagaaaaacagtaaaaacttctccggaagctttgaaagaattaatcatcaaattaagacaaggaagtcgtatggactcgcccagtgccgaagaaaatctaaaagggttagagaaatactgtaaaaatctgactattcttgcaagagaaggcaaattggatcctgtgatcggtcgagatgaagagattaggcgtacgatacaggtcctttctagacgaaccaagaataatcccatgttgataggagagcctggggttggaaagactgcgattgccgaaggacttgctcttcggattgtgcaaggagatgttccagaaagtttaaaggataagcatctctacgtgctagatatgggagcgctgattgctggtgcgaaatatcgaggagaatttgaagagcgtttgaaaagcgttctgaaaggagtagaagcttcggaaggagcatgcattctatttatcgacgaggtacataccttagttggggcaggagccacagatggggctatggatgctgcaaatttattaaagccagctttagctcgaggaacgttgcactgtattggggcaacgactttgaatgaatatcagaagtacatcgaaaaggatgctgctttagaaagacgtttccaacctatttttgtcaccgagccctccttggaagatgccgtttttattcttcgaggattacgagaaaagtacgaaatttttcatggggtacgcattacagaaggagctttgaatgctgctgtagttctttcttatcgttatattacggatcgttttcttccagacaaggcgattgatttgatcgatgaggctgctagtttgattcgtatgcagataggaagtttacctttgcctatcgatgaaaaagagcgggaattgtcagctttgattgttaagcaagaggctattaagcgggagcaggctcctgcttatcaggaagaagccaatgaaatgcaaaaagctatcgatcgcgttaaagaagagctggcggctttacggttgcgctgggatgaagaaaaagggttaattgcgggattaaaagagaaaaaaaattctttagaaaatttaaaatttgcagaagaagaagctgagaggaccgcggactacaacagagtagcggaacttcgctatagtctcattccttcacttgaaaaagaaattcgtttggcggaagaagctttgaatcagagagatgggcgtcttttgcaggaagaggtggatgagcggttaattgctcaagttgttgccaattggactgggatccctgtgcaaaaaatgttagaaggagagtctgagaagttattagtcttggaagaatctttggaagaacgggtggtaggacagccgtttgcgattactgctgttagtgattctattcgatctgctcgagtaggtttaagcgatccacagcgtccactaggtgtgtttctctttttagggcctacaggagtcgggaaaacggaacttgctaaggccttagcagagcttttattcaataaagaagaagctatgattcggtttgatatgaccgaatatatggaaaaacattctgtttcaaaattaataggctctcctccaggatatgtaggttacgaagaggggggtagcctttccgaagccttaagaaggcgtccttattctgtagttctttttgatgagatagagaaagctgacaaagaagtatttaatattttgttacaaatttttgatgacggaattcttactgatagcaagaaacgtaaagtaaactgtaagaatgctcttttcattatgacatctaatattgggtcacaagaattggcggattattgtgcgaagaaggggactatagtcgataaagaggctgtgttatctgtcgttgctcctgcactaaaaaattattttagtccggaatttatcaaccggatagatgaaatccttccatttgttcctttgactacagaagatattgtcaaaatcgtaggcattcaaatgaatcgagtggctttgcgtttgttagaaagaagaatttcattaacttgggatgattctgtggttctatttcttagcgagcaaggttatgatggtgcttttggggctcgtcctttgaaacgtttgattcaacaaaaagtggtgactatgttgtctaaggctcttttgaagggggatattaaatccggcatgtcagtagagcttactatggccaaggatgttgttgtttttaaaactaaaacaaattctgtggtgtag

SEQ ID NO: 63 - DNA, 432 bp, Chlamydia muridarum
atggagtgtattagactgttttgtaaggatcacttgtgcttagacaaggtgaccaatcctgtttgctcgttgatcaagaaaggaaaaacttgtgagaaagtgcagatggtcgctggttgtataggggtgatttgctccatggtttgcttagctttaggcatagccgcagcagggacaggtttgcttggtgcatttactgtcagtcttggtgttgtagcgcttcttttgggaattgttctgttttgtatgtctatttatgacgttttggaacgccatggtggcttaggatgtcccataaaaatgactagggaaccagctcctgaaccagctcctgaaccagctcctgaaccagctcctgaattatcagtgaaatttactaaaggcaaggatgggcaggaggactgtgctgttattgttgggtgtcgcaagtaa

SEQ ID NO: 64 - DNA, 831 bp, Chlamydia muridarum
atgacatcacctactctagttgagatgcctctatcttgctatcccccaacacataccagttcaacagcctgcacaaaaagaagctcatcactctataagccctcattaatagaaactgttcaacgagtggctgcttttgtttccttagctatcttaagcataataggctttctggctatcttagggcatgctattggttttctgatagctccacaagttgccctagttcttattgcggtatttatcatttccttattaggaaatgctctctacttatgcaaaacggctccattacgtctatacaaagagcttcaacaagaggttgcgtctctaaaagaagtaaatttcttgttaaaatctgttcaaaaggaatttttagggttatcaaaagatttcgcaacaacctccaaagacctctctgatgtatccctagattttcataatctcctacaagattttcaatcttcccatcaagggtttgaggacctactggaggactataaaaattctgcagaggatcttcgtcaaattttttctcaagaaaccgtgcagagtctcaaaagtactatcctatcattaaaagaagagataaaagagatcgtcccattgactgaggaagttcgccgtttggctgagaataaagaagatttactaaagattgttcaagatctgcaagatattcgagataaattacgagcagaaatcaataacctttcgcaagcctccaaaacattaagtgagcagatcgcatcgcaaatagaagaaaatgaaaaactttacgccaatataacaaaagcgctctctcaatcttattctgattcttccgcctaa

SEQ ID NO: 65 - DNA, 492 bp, Chlamydia muridarum
atggatttaaagcagatagaaaaactcatgattgctatgggccgcaataaaatgaagcgcatagcgattaaacgtgacggttttgagctggagttagagagagacaccgggccaaatattcaagaacctgttttttatgataatcgattgtttgctgggtttactcaagaaagacctatcccttcagatcaaaatcttggtaatccgattgtcaaagaagtaggggagaagaaggaagataaacctgttgagggagattttattgtttctccattggtaggcactttttatggggctccttctcctgaatctccggcatttgttaagcctggagatattgtttctgaagatacggttgtttgtatcgtagaagctatgaaggtgatgaatgaagtgaaggcaggaatggctggtcgtgtagaggaggtattaattaccaacggcgatccagttcaatttggttctaagttattccgtatagttaaggcttag

SEQ ID NO: 66 - DNA, 801 bp, Chlamydia muridarum
atgtccaaaaaatcggcttctcattcatcgagaccaacaaaaatgtccccagacacttcctgggaatctattgcccaagattacaacaaagcagtcgaccgagatggacacttctatcatagagaagtgattcttcccaatttactatctaaattacaattatcgccttcgtcatccctagttgatatagggtgcggccaaggagttttagagaagcagttgcctaaaaaacttccctacctagggatcgatctttctcctagtctgctgcgttttgcaaaaaaaaactccggttcaagatctcgtcaattcctgcatcacgatatgacgcaccccttaccagagacttaccataatcagttctcccatgccgtagctattctctctcttcagaacatggaatctccagcgcaagctatttcgcatgcagctcaacttctggctcctcaaggaagattattcatcatactcaaccatccatgttttcgcattcccaggctctcttcctggttttatgatgaacctaaaaagttgatgtctagaaaaatagatcgttatctctctcccttatcagtgcctattgttgctcatcctggagaaaaacactccgaaacaacgtattcttttcattttcctttaagttactgggtgcaatccttatcaaaaacccatctcctaattgacaatatggaagagtggacctctcccaaaaaatcgtctggtaagagagccaaagccgagaacctttgccgcaaagagtttccgctgttcttgtttatttcagcgataaaaagatcttag

SEQ ID NO: 67 - DNA, 843 bp, Chlamydia muridarum
gtgctttctcagcatattgaaagaattaggtctgggcaagtctttgctttcccgacggatacagtgtatgggctaggagtctcgtttctcatacctgaagctgataagcagttatttgctcttaagcgtaggaatcctcaaaaagctttatctgtttatgtttcttctcttgaagaattggagtatgttgcccagcgccgcttaggagaggcttcaattaagattgctcaaaaatttcttcccggtccactcacattaattaccaaacataataacccaagattttctcaaaaaacgttaggatttcgaatagttgaacatcccatagtgaagcaaattatccaagaagtaggtcccttgcttgccacctcagcaaatgtatcggggttcccttcggcggtttcttctgatgaagtaaagcaggatttccctgaaaaagatattttagtgatttctgggacttgctctataggattggaatctactgtagtagatgctgaagagcgtatcatttatcgagaaggggtggtatctgctgcggaaatagaagatgttttacaagcaaaatgtacttgttcccctagaagccagtcttttagggaaagtattcgtatttacgttgtaaaaaatcatgtggatttgagctcttttctctctgctaagctagccttcaagggagttatttgtcagcatcctcagccatgcactttttactcggttttgagacaagctttgcgatcttctactcaagaagtgatttttgtttatgatgaaaaaaatacggaatacccagttctttcaaggtttttaggagcaagttatgatagtggatatgcattgtga

SEQ ID NO: 68 - DNA, 1521 bp, Chlamydia muridarum
atgatcgatgttttaattatgggagccaatccttcaggattgattcttgccaacatcttacagcagcatggcatctgcattaaagtaatcgactcccgagatagcataacagccccccttgccattcctcgaccttctcttcccttggttttatcgtcatcttctttagaacttcttgataacatcaatcttttgggagacctgctggataaaggacgtaaattctttggtgcccgctatcattggaaacaacgtacggtgctctttaaatttaatcagtcttccgcttctcgttatcctttttcccttttgatttcttatgaggatttggttaaccatttgctccaagagtttcaaaaacgtggtggcgtagtagattgggcaacaagacctgttacccaagtcgaagaaaatctattcatagagagcacaaaaacttcctcgcaagtctatgaaaaacgggagatctttgctcctaagtggatcgttgcttgtgaaatggatgcggatccagatcttagagacttagtcaaaacacaaatcaaaccaaaaaaattccataaagaagctcttttcgtagattgcgaagaaggagaaccttttgaagaagctcatattcaccttcttcctgtaacgaaaaattttgctaactttgttttttacaacccatatagaggatctcgtcagctgtacctagcaaacacttctggccctctttctcctaaatttaaaaacaagcttttgtacacatatggtcttgcattagcagaaaaccctctttccatttctgcatcatttatgcaatatcctttttgccataaccgctacatttttttaggaagcgttgctaacaacctctccttttcttatctctctggagtgaacttaaatattcatgaagcttttaatttaggctggaaacttcttccagtaataaaaaaagcagcctcctctcaactgattctttccagagagttgaaaacaagtcatgtgttacctcattttaatgaggttcatcaaaaaagaactgcaaagcttcttttttcaaagatgtatactccagctttaatgtactactaccttaagggatgtcgacagcttgatacagcggaaggagaactatactacccctctcatcgagcttcaaaatacgaaactagtgatattattaaggtttctcctaatgataaagaaattcgcggacctaaaccagggtctcgcgctttagatattcaacttgaaactgcgggctatctattagattcgttaaaaaatgccaagcatttgcttattttctttaaggagcgtccagatttaacgcatgctcttctcgaagagtatggggaatgggtagatgttattgcaactgaaaatcctaaggtacatagactgtaccatgccaatcccgaatctttgtttattattcgcccggaccgttatattggctacagaacacacgcattcaaattgcacgaactcatttcctacctgctccgtatttttgctacagaaagtgtctga

SEQ ID NO: 69 - DNA, 735 bp, Chlamydia muridarum
atgggaattcttattgaagctcgtcatgtttcgaaaacgattaagcaaagagatctccatattgatattctgaaagaggtgtcttttcaattgcacgaaggagaggttgttgcgattaccggagcttcagggagtggaaaaagttctttgttacatcttttaggaactttggatcagccaagttctggacaaatattattttttggtaaaactgttcgtctcgaggaccttcctatttttagaaatcgtagaataggattcatttttcaaaatttctatttgttagaagatgattcggtgatcaataacgtattgatgcctgcgcgaattgcaagaaaagatactgggaagaagtctgaagcaagagaaagagcgatttatttattagaatctgtagggcttgtagatcgacaagaagaaaaaggttgcttgttatctgggggagaaaaacaacgagttgccatagcgagagctttgatgaatgatcctgagattgtattagctgatgaaccttctgggaacctggaccgtcgaacagccgatacgatccatgaacagctgctatcacttgcggggaagcatcgtggggtattgatcgtaactcatgatcgagagttagctgaaaaatgccatcgagaagaaattctccgcgatggcactttaacacagcgtagaaggggacccctccaggcttccttgaaaggtataggcacccttccatccgggaattattaa

SEQ ID NO: 70 - DNA, 9768 bp, Chlamydia muridarum
atgcccccttcagcaatttcaaaaatttcaaactctacgacgcctcaagttcagtcttcatcggctcctaaccttaccatgctcgaggggaagggtatttctgttgaaaaatccttcagagtttattctgaagaagaaaatcagaatcacacaacagaagatgttgttcgcattggtgcgatgctgcaacagcaattctataatatgacaactggacgaaacgagtcctttacggtttctccagcccatcattcaggtaattggaagacttctttgctttataattttgctcaactcgttgcgcatattttttctttgaatacggttccggcaaagattatccatcatgaaaatgggacgaaacagaattgggagagtaaacagcctacagtttcttcagaaaaaagttctaataaaagagatgtgtccgaatccatagctgtggttcagcgagtgaatccggaagtgatcacgaaatcttctttgaaagcaaccaagtctattaggagaagaaagcctcgatcggttgaagaaaaacgtgagcaacttgtaaaggatccagctgataagattgtatatgatctacgtgcagatacgatcgcctcgcgcttaaagttgactgaagagcaaattcagaagtgtcgaatttctttgaataatttaaaaaaggccattcaaagatatctcaatatagatgaatcagaaaggaattcgagaaaaggacaggatctgctagtcaaacagtccatttttcttaacaacattcttgaaaatgccaaaatggaggaaagtgaagagtttaagaatgtgatgtctgtcatcaaaactgaatttaattctcatcgagtaaaaattgacagtcattttcacggaatttggattgctggagctcctccagaaggcacagatgtttatatcaaaacttttctgcaaacttatgaggagtttgattttttattttgggtagatagacaagcttttggagcggctaaattttcctctattttaaaaaaaatcgcttttgattcttctcttaaggaattgagatcgataacttctcaagaaactcaagattttgtgaaagaatatgacgaactacaggcgaagtatcagacttctggtaggcgtgaagaaagacgtgaattggaaaaagatttacgtaagttatttgatcgctataagcaccttagccaagagatccgaacaaattttgatgctttgtttcttaaaaatatggtcctttcccaagacgggttttttaattactgccttttgaaaggaattggaacaattgatgaccaaactcgtatagcctatcttcaggatgagttacatcttcctgaagaagaaattcaacaatataaagatctaataaaggcgaatgagcaaaaaataaaagatattgttggtaaggtaaatacagacttagggaaagagagagttttcattaagaatattagggatctgtcttcaatgcaagatagaactaatacgtacaactatgaaatggagatgcttttgaggtggaattaccctgctgcttcagatcagatccgaatgtacatgttaaaagagttaggaggaatttatacagatctagacatgatgccgcaatactctccggatgttttgcaaatgattaatgagatcgggggagatagatttttcgaggaattacctattcgacgagcggtttcagatggggttttgagattagcaaatggtgagtcagggatcactattgataatatcgctcaggacattgatatctcaaagcttactagaagtgatagaacacaactcgaaaaacttttgacggacatagagaataaacaaaaatcaagtggcacttctaaattttctctattccaaaggatggccccagactctgttagagattttatgcctattttgcaaaggcatcataaatggtctacaggatggaatgtccggggcttaaatggattaatgatggctcataaaggaagtgctatggtggatgctgtgatcaagggacagcgtcaagcttatcgcgagctaaaaagtcttcgagaaactgttttaagcggcgaattttttaaaacattggatgatttaaaacatctcaatcacaaagctttgatcggagggcatttagtcgaagatttccttggtaaaagtcttttttcagagtttagacaagatacaattattgctggagctttaagtactttaggtataaccggcccagatttaattgtagacgaaatgaagacgtattttcgttctttaggacctattggaaaggactatctggaagggaaaaaattagggaacaaagctttcttaggttcgtataacaaaattgtaaaggagggtaaacaaacttttgactggctgcatcccgtaactgtaggagcaaatgatgttactcctgcagatgaaagcacctggtgtggaattaagcaaagatgtctggcagaattattattttctgacgaatccaaatttcgtccagaaactcccaagggcatttctcgaacgaaaattgacaaaaagacttttacaaagttgtggtctgaacaatctaagcgtgccctttcccccgagttgctagatcgattcaatgagcttatagaagccaaaaattttgatcttattaaatttactgacgtagatcgagcgttatacgttcttcgtaatcaagtgtgtgatgatgcttcagcaagtgctgctgtgttttcattgcaattgcaattagctgagttgcttcgagggacttctttccctatcgctaatcaacttaacgtattccccgacttaaatagaaatattgcatctagtcttgaaaaaacgattaagttgtacttacaaagccattctcaaacggaaacagtgatttggcatagcgccataagtgatcgggtaatgtttttaagggatatgttggctaccgcagagaggatgcgcttagttaaagagagtatcttttctaaagaagaaactcccttaacaactgaagaaataaagcttttaaattcttgggcagagctgcaatccaaagataacttgggtattttatctcttgaagaggtcgataaattgttagatgtaacctcttcaattatggagaattcaaaactaaaaaaacgcgtgtcagcaatagaagactccatagtagcaggctatttttatttaagattagaagaaacgctgtctgagtgggtacgtattcctccgaaagatctaaagaaaagagtcattcgatttatggagggaatggatgctaatcagcagcatcctgatgaacgaggaggacgatggtatagtcaactttatgatgagagcttcaaaaaacgggtaacagctcccgtgaaaaaaatacaggagttagcaaaaaaatatttaaatgaacagcgcgtacatgttcttgaaatagacgattatttaacaaagaatcccttgtttaatcgcctgcatgaggaaggttatgctttttctgatttaacagagatcactcggtatatgctcgccgaatatgggatctctgggattttttcagaagggaatattttgccttctccatctgctagattagtgaatattatcaaaacttatgtaggaggggattaccatgacatgcaagacgttcttcctaagatatatgactggttggcttctggaggtgcggcagatttaactaatgagcgttttgcagctattccagaaagtttaagaaaaaatttagaaggattacacggaacagatttattaacacctcctgttgacgctagcgtatctggatggggaatgagtttcggggtagaaaatggtgtagaaagtgaccatacgatgatcagcattgctccaggattctttaacggagcatcgtattctatgcagcattatttaagtgctttatatgaaattcatcggcatatccatttgggctcgcttactagtgatctgataaagaaagagttagaaagcaagggagctggttgttttgtacatgaagagcgctttgacagccttttaaaggcttcttcagagaagcaatatttatctttaacagaaatccataagtctctttctaatcaggtgcatttagcagaagctgtatcgcacttgatgaacacagctttgcctggggtagggaaaattattgaaagggagggagattttggccgcttgggcataacgacaacagaaacctcggtggctatgcgttcttatgattaccgggggattggagtaagtaaagacttgttctctcttccacaagaagtccccactatacagaatgtagtggagcaagccaagtatactttgttatcttggccagaattttataatcgctatgcaaatgcttggagtgatttagctactcattatggagcagagattctagaggctcatcctcagtcttttctttatgaggtggaggggcgctgcatgggattgtctctgttgtatatgtccatagaagatgagggaggctatagaactcttcaagggaacctagacactgtttccgcactatatcagcaaaaagaacgcgatcatcttcccctatcaagtaaggatcaatccttactaagtcgagacctctcattaattaactggctacagtatcaagggaataaagtcttactagagaataggggctttaatcacgctaaatgggacgttttgcagttaacgagtacgtttgagaaaagtctgactaaaagtcttcttataacaaccccgacacattctttaactctaaattttatggggtctttttttagagtaacagatcctaattttgggcatgttgactttccttcgctggcagcggcactttattttattgaagatatggtgcaagtgtcccctcacattaaacaacggtatggtttttcggaaaccttgtccgtaagagaacaactccaggtttattttttggatgctcctgagggaatacagtcattgttgtcttttaccgatgcgggacttttatccagtcatcaggcaactactttagaaaaaatgcgagaaaggggacctgttatcatagaaagaatccaaaccacttgggggaagctttatgaaataggaggttctattcatcatagaaggattgatgagttcacttcagaaaccgatttagatgaaatgaagttaaatggagatgtattaacagactttcttacaaaacatgttttagattctgaaacggtatctctgattctagttttattagaaacaagaggactagaagaaggaactaaacatgttagtcgttctttgattgtagagacgccagacgaggcagcatctctatttcaatttcttaagaataagactgctaaaacaagagagatgttagttagtttgttatctgaggtaacagacaagttaaaaagcgcgcaattagacggtgaggatgttgaagtctcaagggtcagtttttcagataattccgatgagatcactgttgaggtaaaaaaaggaagccttctcaaaaaactctcgatacgaggaggaggaatttttgactctttcaagcagtttagcgctaaggcgaatgaattaggcgctactggggttatggatttagagctcggaatgagtatagtgtccattgtgcaatacatgcgtttgttggaagaagggaaggggaaagatcccttagcggtagcaaacttagtaatggacgtgaaagaaactgcagaaatgacagtcggtgcggttatacagggtctttcaaaaaaatttattactcaagaaggagttgatgggttccgattagaaactgccatagcatctcagttaaaaaaagcttcatctagggtgggagggagtgttggaaaggttttttctaaaaccgcagctgttttagagcttcctgttcttgaaaccgcattaggagcctggaacttatatgacagcgttgtttctttaaaagaagctcaaacgcattctgaccgcatggctgcacgtgtggacattgcgtttaacagtattactttagggattacaatagcttctgttgctttaccctctttgatgctagctgtgggtcctttagctgccattggaatgggagcaagtgctattgcccgtaatgtagcgttaaaggaagaacgttacgatcagtggttagtatacaagaaatttctcactgaaggaggctctcacattttattcgctgatccggatcggcatttattagatttttctggcaattatgttttaggaaattttcttttagatttacgccaaaatccacctattcttaaaggagatcgctcttataattctaattggagaatagggaataaggctggttggacagactggcaaattcgagatagaataggttacggttatcgaatttctccgacgtcagcattagctcgagggcatgctaatagcttttggccgccagagttgcctactatccctaaaggggattataggacagttattttagggtatggcactacttatgaagccgtcacggaggtggtctatctttctaacaaggttgtttggagagaagctgtcatggaatcatcttctcgatattataggcctcccttaacagcgaaatcaaaattaagcaccattattgggggagattctccattaacagttatccctgtcagattgattgagaaagatgaaaaggaaaacatagatcatgctgcctcttataaagattataaaattaatatcaaaggagggaaaggagggcttactgtacagataggaggggccggtttttataatttaacagggactctccccgcaactaatacgatttctttccgagcaataccagctccttttggcgttaagtttaatctttcattagtagaacaagatgttccgctgataaggccaaatggcacagaagaaaagtttttaaaaattcgtcagactggtttcaatacgattttgggttcgagtgaagggaatgatactcttacaggagggaatgacacaaaattttattccagccctggaggaggaactatttattcaggtaaaggaaaggtagaatatcatattcctcagttaacgcatcctcttcatattattttatctaaaggttcttctgcgcatcagcttgttactgagataaacgcagaccaggtaaaacctgttctcggtagtttaagtttaacaagcagcatggagcttatatcaaaacaagagattcacgtttctagtgaagacactaaggaagatcttggagtttggaaagagcgctatgaggtacgtttaggtgatggaatcactgctacacccatagatcagatgaatgcaggaactagactcgtaactatgggagttaaaacgtgtgatgtagcgaagtggcaaaagcaacacccgacagaaacaagctatccagaagatattctcgattggttaacacaaaaatcttggtttttggctcccgaagtcttatttgttcttgaaaatgggacagccaaatttataactaaccgaaaacatattgtatattctccaaaaccttactcagagttagcggtgactcaatctagagacatcaaagccttcgtacaaggaaatactgggtgttcctatgtattctctacaatttatcgtagtagccaaaagactcaacagacagaactgactctagtagatgatgatgtttatgctcaaaccatagatgtaagttccattctaccaactcttatattagctaagaaatctggagacaatcaaatagattttgagttctcgtcttcgcatcatcttatggctattcgagtcagttggaaaggggttattcctgagagaactcgtgtaaaaattaataacgaaacaatcctgcgattggggtggctgaatgcaaaacttatggcatctagaaacccaagttattggaatctgctttattataacaggaatgttatccctgagcgggttgaggatgtgaagagcctcaataataccgtaattttaatgcctcccaacacaaaaagaaatggtgaacatgtgttcgctatagaaaatcaggaaggcgtagatgttaaagtattaggatttttgcaatcagggcatgttttaggagaatatgaagaagatttgatgtacaaagatgtttttgcccgaaagattacccattttgcggtaacggtacccgcacataaaacgaaatatcttttctttacagatgaggagtctttagctaatccggaagataatgttcttttttatagtaagttaggttcgaatactctccaagctagtcagaaacctttaacacagtttgctagacaattgtgggcatcttacgatgagatcagcgtaagcgatacttcattaaaattagaaaattttgttcgctacttaatggaagctgaaacaatagagttatatcggcagcttctgtatgcgcaaaatctcttaagaattcataatagagaccttgtcttaaaactattttatgttcgtcaatctgaagggatgggcgcagtactcatcacatttaaaaactttttcatagaatccatggaggggatttcagcgcctactttagagagagaagcgaaacccatactggcttctgatcctatgggattaattaatcctgcatatagagaacatttagatcttttcctaggtgaagacaagctcaatttagcgattttagttcaagaattcagcatgttgcagtacatcgtcagcatgcaagaaggaaaagctcttggatccttacttacacctccaagatataaggatatgaacttagctgtgctcacatatacagtggcttcgtcttgggaaggtagaagagaggcctcttggctaaaagctcctatagaatacaaacttcctttggaaactacactgaccgcatcctattatctasatcctgtaagtggggatttatatgtcacctgtttaatgaacagaaggcctcaaaatcaggcgtttgttatcagatttaaaggatataaattccagaaaggagcttttcgttcaatagcattgatttcttcacatagtgttggtgaatctcggatcgcgaaaactgtattgcaatttcgggggcaagaattattccatttagagaaatctgctccaaataagagtgctgttttgcaattggatagtaaattactttccctatctagaatgcttttttatggtggcgatcaggtcattcggtacacgccgctttctgtacaacagttcctctctctagatgacttatggttagctgatcttaaagaaagagtaatgaatgctaatgaagaagggtttaaactaatctcgcaaatgcatgacagttatttaatggaatcctgtatgaatttgcgagatgccgtacctcaatggaaaattaatccaaatgtaataaacaatgcgattacctattatagagtggtagttcctttctggattcgaaatcgattaacgaaaggatccttaattcgaattcctgctcacagtattcctatagctttaacaacaacgcaaaatgatgttttcaaaacaatttatgctccaggatttagtatttatttcagcttcttaggattagacgcattcttgaaacctcgtactcataatagggttggggatatgctccttgagctggaaaaagaggttgttgtgaccgtcaagaaagttgatgaaacagattataataagaaaagggtctatattgttacggaacttacaaaagaagaagaaagagttttaaaggccaacaaaaacgtcattacgattccaatgaagtcttcttacacaaagaaataa

SEQ ID NO: 71 - DNA, 10008 bp, Chlamydia muridarum
atgcctgtttccggttcaattgttgcatcgaaagaaaatacttctgcgtcattgcaaccggctacaactcttaataacggaagttctgtagaattcttccaacaaattactgtatatgatgacgcccgaaattttacgaatcatacaacagaagatgtgattaaaattggggaacagttacaacgtaagttttacaatatgacagaaggaactcaagttccttttacaacctctcctgcttaccataccggaaattggaaaacagcttttatctataacctggcccaggtgatagcaaatctttttccttcgactatacaacccatccgagttaattctactagaagctcaccattttcaactaactcctcagtagaaaaaagaaatcgcttcacttctaaagatacgaaagtccaaccaccacatacgacacggtcagtctcgccccgtaagagaaagtctgtaattgttactcgttcagtaaacattcataaccacacaccagataaaaaatcctctggggaatcccttcgtaatatttctttggagaaacctgttttatctaggaaaaggcgtgatgtagaaaagaataaagaaataaagaatgagccgtctgtcaataagtatgatcttacatataaaaacatagcggaaaaactagggctctcttctgaacagcaaacttctgttaaggagctattaaataagcttagaaaagctattactaattacaatgccctgatcgaaaaaaactctagtgaggggcagtctttactaattaggcaagccaagctagtggaggaaatccaagagaagatttctcctgcagtctcagataaaaagggcaatgagaagaaaactgaagaaaagtctaaagtatcttttataaaagatgttgctgacatcatcaaagcagagtttagcgggcaccttgtaccagttgataaaattattcatgggatatggattgctggagctcctccagagggcatagaacagtatatgagggtattcttagatacctatccagactattctttttacttttgggtagatagtaacgcttatggggcagctaaattttccggaattttgaaaagaatggcttttgacgtagctattcaggaattacgagattctacagaagaatcaacaaaagtctttgttaaagagtatgacgatttaaagaaaaaatacgagcaaagaattgcacaaacccattctacaaagaaaaaaaatgaatatctccaagatcttcaatcgcttttagaaaaatataaaacagtctctgatgaagttcgtggacgattcgacgtcctgtttcttaagaacgtagtaatcactcaagataacttttttaattactgtttgttaaagggtgtgggcaacatttccgatgaaactcgtatggagtatttggaaaaagaattgaagttttctaaagaggagatagaagaatacagaaaacttaaggaaagtaacaaggagaagattgcttctgttgttaaaaaattaaatgagcagcttggaagtgctcgggtccacattaaggatattaaagaacttaattccatgaagcactcccaaaatatctacaattatgaaatggagatgttccttcgttggaactacgcggcagcaacagatcaggtccgtatgtatatgcttgaagagtatggaggactgtatacggatttggatatgatgccagctttttctcaagaggtattagaagttataaagaaacatagtgttggcgaccgtatgtttgaagatatgacttctagacgggctatttctgatgcagttttaaaactagccgtgggggaaacaacaacggtctctatagaggatattggaaaggacatagatatctctcgcttaactgaagaagacaaaacaaaattaggagaattatttaaagagttagaattttttgtaaaaaaagatactcaaaatagttctaaactaggaaaagctaaaagtttctttcagccaatgaatatggatattgtgagagatacgatgcctattttaaggcgttatcattactatcctgagctaggttggtttgttcgaggcttaaatggactaatggtttctcataaaggaagtgctgcggtttctcatgtgattaaagggcagcaagatgcttatcaggaactagcggcaatgagacaagaagtcctttcaggagagtttttccgttctttagaagatctaacgcatagacaacataaagatctcattggtggccatcttgtctcagactatttagcgaagagtcttttttttgattaccgacaagattcgattatgccggaagctgtgagtacgttaggtataacagggcctgatcttgtagcgcaaaagcttgtggaattgtttaaagattggggacctctaggacgcgattttttaactcctagagggaaaaaacttggagatatggcctttttaggttcttataaaaaaattccattagatccttctgatcccagaaaatataccttcgattggatgaatccactgaccgtaggtagcaatgacgtaactccggctgacgagagcacttggtgtggtagtaaaaaacgatgtgtggccgagttgctcttttctgattcatcaacaaagttaagtacaaataaacttcaaggagtaactcgtacaaagatagataccagtacgtttacttctttatggaaagaagaaagcaagaaaaaacttcctcctggattattggaaagtttcaatcgttttattacagaaaaaactgttgatatcctaaaactttcagagttggatcagaagatttatgtaactcagtcagctattcaagatgataacattgctaaagcctccctattttctctgcagttacagttagctcatttattgcgttttgctccatatccggttacgaatcatgttcatttcttccctcaaattcaaaaagagcttgatagcgattacgtaaaagccatcaagctctttttgaaaacatcttctacaactacagtagtcttatggcacagctctcagcaaaatttaagcttattctttaaagagctattagcgatttcagagagaagggttgccatttataatctgttaaatccagaagaagctgcaaaagcaagaaaagctttagaaaaaaaggagcgggacaagaaagggaagcagcaagaaaaagactcttctgaaggtgaagatcaacaaggagatcaaaagaaaaatttctcagaatatgcagaacttttgaaacaatacgaacaacataaggctaaggatagtcttggcttgctatctgaagcagagcaaatgacttttcttgagatcacaacgcaaatcgcagaaaatcccacgttattttctgtaattagccaaatagaagcagaaatttcgtcaggatatgtatttcgagctttagaaagtcaagtatcgaaatggttttctcttccagagcaacaacgacgacagcaaatactaaatttattgaaagagctcgaaaaggatgccattaaaaattccaagcaagataagaaggatcataaaaattggctagaaaccttgtacgatcaggcagaacagaaatggttgcaagaaccgaagaagaagctgcaagatctcattaaaaattcaggtgacaattcaagggttattttaaaagactccgatcagcttctatcaagaaatgaactatttcagtccatgattaaaaagggctatccctttgcagatttcgcgaatattctacgtttcatggtagccgatgcgggaatttctgggattttttcttcaaaagctattttcccagccccatcaaagcagctggtcgatcttttaaaaaagacattgggaggcgattttgcaacactccaagatgctctaccaactgtttatgattggattttagaagaacctaattctgaacgaactaataagttattcaagcaattccctgaaaatttgcaaaaagagcttaaaaatatagccccagagcatcttctgacacctcctatagatacgtccgtatcagctttggggatgcgtttttccacggaagttggtttagagtctgatagtgttatggcctctataggtagtggatttttcaatccatcttcttactcaatggctcgatatatggaggctatttttgaacttcagcaaaaaattgtgaatggggagttacaaactgtagaaaccgttaagaatattttgcagaaaaaaggagcagaatccttgtatcatgccgatagagctgctttgttagtgcagttctcggaactaagatatcatctctctttaacagaggtacaaaagggattagctgatctcgataatttaggacaggctccctcttatcttcttactggtccattgccaggccttggacacatcatgctacgagatcgagattttgggcttcctttagcaacttctatgacagatcctataggacttagtacctatgatttttccggaataggggggagaaaagatgtattttctacaccatcggaagtaccatctattcatacgattatagatcgtgttaagtatgataccttttcgtggacaaagttttatgaacgttattcgggaatttggggagatttagcttttcgattaggagctgagtcattgcgaacccatcctcagacgtttatctatgatacggaagggcgttgtatgggcctttcttatttgtttttagccgctgaaaatatagctgcttatgggattttgcaagacaatctatccactttatcagcattatttttagaacgtgaaagagaaaagcttccgttatcccgagaagataatagatttttagatcgtgggctcgctcttatcgaatggttacaacatcgagggaatagtgaattgcaagcagggggtattttctctactgtggattgggatattccctctttaactaaactttttgaaaaatcttctgttcctggtgtattggtgaccacgccttcacatgcagtcactctccacttttttgatggggcatttcgagtaacagatcccaattttggacacgtagattttccttctttagaatctgccctctactttttggaatatatggttcagatctcttcagatgttcgtgctcaatatggaataaaggaaggtgtctccgttccccagcaactcaaagtatatgttccagatagtattgaagctcgtaatgcttggaatattcctacggatgcaggattagtaaccggttatcaaatgactacattagatcgcatgatagtcagaggagaggcttctttttcaggaatccgaacaacttgggcaactctatttgcaatgggattgactctaaatggtaaccgcattgatgaaagaactaaagaaagtgatcttgataaaacacaaataaacggagaccttttaactagctttttatctaaaaatgttcttgatgaacgaggagttgcattaggtagaaccttagtagaaacattaccttttgttgcagggactcgtttagtcagtagtggagctattgtcgaaactcctaatgatgtagcttctttgttacaggcatctagagaaagactgagccattttaaagatgttatccaagtgcttttacgagaattggcaacaaaaattcatggtaaggggttaaaggattctgacaaggtatcagtaaaatcagtaacagtagaaccttcaggagaagctgctattgtcttggaaaaacaagatacaccaaaaaaaacttcctcttatacgatttctgtgaaaataaaatctctaagagatgcttttcaaaattttgggaaaagtttaaacgaactggcaaacactggggtaatggacgttgagttaggcctttcggtgctttcattaatccaatacgctcgattagtggatgctgggaaagggtcttctcctgaggcactctttaatcttattctagatgtaaaagaacttacagagatgactgtcggaacggtcattcaggcactacaaaaacaatttattactccagctggaatagatggatttcgaacagaaactttattagctcggcaaatacaaaaagttggaactcgtgtaggaggaacggtagggaaagctttaggatcggttgctagagttttagaacttccagttttagaaacgatagccggggtttggggattagtttctagtgtagaagaccttttacatgcagattcttatagtgatagagtggcggctaaagtacagatatcctttgatgtcattacattagccctaacactttcttctgctttagctcctttagccatgttagctgttggaccaatagctgccattggaatgggagcggcttctatagcaagaaacgtagcaagaaaggaagagcgtcattacgcttgggtagaatataaacagtttttagattcagcagccaaacttgttgttaaggcttacccggagagtcaccttttagatttatcagggaaccgagtattagggaatttatatcttgatttaagtcagaatccacctcttttaaaaggggatgtttctcgtaattatgattcgctaattggacacgttggggattggtcagacaggcaagttcgaaatcgtttgggatatggatatcgaagcagtccagaaagagctttagcaaagggacacgctaatactagatggcctagagagatcccacatattgctaaaggggtttatgaaactgtttatttaggatatggtatccaatacaaagtgtatacggagatcgtttatctttctaatcaggttgcatggcgagatgcagtaatggatcctacatcgcgctattatatacctcctttagttgaagaaggaaaaagcgcaacaattatagccggaaatacgcctttaaatgtaatcatgttgcgtcttttggacgaagatactccggccagaattagtcaaaaccttgcttataaagactataaaattaaactcgttggaggaaaaggtggcttaacagttcaaataggtggtggagggacgtatactctaacaggagatgtttctgcaaaaaatactatctcttttcgagcaataccacctcctttgggggtatgttttaatttatctaatcatgccatgcaaaacgttcctatgatgcgtcccaatggcactaagatagaggctttaaaaatccagcagacaggattcagtgtgattgcaggatctgctgaagggtatgatatactaactggagagaaagatactcacttctatataagttctggaggagggaaaattttttcaggtttagggaagaactggtatcacatccctaaacttaaaggaagattagatattattcttgccaagaactctgctgagcatcttcttttgatggatgactattcatataattggcaatctcttggtacaaatctcactcttattcctagaggagaaggaaataacaattcagggatatttgtttcaaattttgatgcgagcccttcctttgaacaatgggtaaataaatttactgtaaaaatggcagatgggattactctttttgccttaaataaatcttcagaggaccaaaatttttcgttagcaactactaatacaatagtgactttaggggtgcattcggtagatcaaactatttggtcaaatcgtttacctgaagagccttcttacatagaaaatatttttaattggttgaaaaaattttgttggtggctagctcctaaggttaccgttttacaacgtgaaggaaccgcagatttttattatcgtgatcaaaaattgatctaccatccaaaaccttttgctgaactagatcttcatcctcaaccaggatatcatacttatgtaaacggctctatcggcgatacgtacatattctcagagtctccctgggttaatctttctacagtgaaattgtcgttagcagatgatctagggcattcacaaacagttgatttaagttctcttgttccgacttttgtacgggggagaatgaccagccaaactgtaaatgggccctctattgatttggaaatttcttctcctcgctacacacttcctttacagataagttgggggtctcatgttttgcctagaaacacccgatttgatgtgatgccaaatcactctccaacgttaggagaatggtatgacaagttaaacacaaatacttctgaatggcacacgctattccacaatagtatgttgattccaaaaagtctggtcagtgtattgagtttgaataataccgtaacggtgatggtgcgccatctagaaagaaagaatgagcatattctaggggtagaaaatagagacagtatcaatcgcaaagtacatggacaactttatgcaggctttatcacacatactatagaaaatcgccactggtatacgttgcaacctaacctagttgagttcgatattactgttccagccaagtccattaaatattttgtgttcagagggaggttgctattccgtagctatcttgagcccaaaactctagaggtaagaagtggtacgccaattgatttccatgtctggtcacaatatgataagatccacgtacatgcaacaacactaaaattagaaaaattccaagtatataatgtaactaccgcgacagatgcgttaaacagatacttaatgtatgcgcagaaccttgcatatatttatggtagagattttgttctgaagttcttctttattcgttctggaactggaattggcgccattcaattggtatttaaagacctatttaaggatagtttcggaacagaaaaaactttggggaaagaagctaaatctaccacgccgttatactcaatcataaatccttcatataaagatcacttgaaattcttcttaggggaaggagagtatgatttaacacaatacattcaagagattagtgatacttcgcatattattgaaatgttgcgcgacccaacaacacatgaattacaagagccttcgcatctaccaaaaaatcctattgttctaacttatacaattgatccccagaaagatagtgctggtggagggaaactacagtttttagataaaacaataaaagcttatcaattgccattcccaacaatggcagagcactattattacatggatcctgtgagtggggatttatatataacctgtatagctctgacaaacccagtagaaagagctttctcattgagactccccaaattcaaattgaactggttagagtttcagaacatttttatttttggaacccattctcgtacatcacaagctttaggatcttcagggacaggcgttatgtttgttgggcctgagattctgtatatggaaatagatctttcgagagttattgctgatcgttctttccctgatagagtttcatctagatcgagtgtcgtattcccaacaaatgatcaagttgtgctgtataatccatctcttgcaaagaaattctacagctattcagaatctatgatttggaatctgcgggatagagcaaaaggggaatcggatagagcaaaggcttatgacatctatctgctagacgcttgcacatctaaagacaagaaccttaattgggcaattcctccgaaactcttagactttgccttagcctattatcgggcatgggtaagtcattgggtgaaacaatccttgaaaaaaggctatttgattcagttgcctgctggcagcattcaagtatcgttaattacaacacagagcgaatatttcgcgcgtcaaagaaaacaaggattccaagtcttttatagtatctatggattacaagggaaagtgattcctaagcaatttcctggagatatgctttgtgatatcaaagaagatgtagtattgacggtcaaagccgtggatgaaagtgattatgataatagaaaaatttatgttgttttagatttagcaacagaagaagagcgtaaattacgagcagataaaaatgtcattgtcattcccggaggagaacagtcgaaatactaa

SEQ ID NO: 72 - DNA, 9678 bp, Chlamydia muridarum
ttggaacaagcattgtgtactatgactctttcgaatacagcctcttccacagtttcacctaagtctacgcaacttaaccatactttatccaatcaaactcaccctgttgctcaaagcaataggaatatagatttccaaatctatgatgaacagattcataataatcattctacagaagatgtagttgctataggacgtcgtattcagcaagaatatgcgaatcttaccacatcaaaacaggttaatttctcggcatctccatctaaccatactggaaactggaagatttctttgctttataatttatcgatgctggttgcaaatctattccctacaactattcagcctgtgcaacctcaaaaagtcatctttaagaatcaagactcttctaaggaaacccaactgaccaaatcatccaaagtagtttcttctcgctcttctttaaaagagattttttcgaagaaatctcctcctttgagaaagtctttttcttcctctaaaatttctagagcaatccctagaagaaaaaaacgatcaaacgatgatccagttcaagccacaaatacttatgatttgaccgctgaaaatattcttgaaaaactctctttaacacaagaacaacaaattaagcacgataatctgattagcaatctcaaagaagcaattaatcgatatagtgatcttaatcggaaaaattcccggaaaggacaatcccttcttgttaggcaagccaaaattctagatgaaattctttcacagactaaatctacagaggaacgagcttccaattctgtaatgacgactattaagaaggaatttacctcccaccgcgtacctgtagagaaaaatattcacggaatttggattgcaggttcaccgccagaagggaccgatgaatatattaaattgttccttcacacttatccagagttttccttccttttttgggtggataaaacagcttatggcgcagcaaaattctcttctactcttaaacgaattgcttttgatgcagcagttaattccttacgagaggctactccagagcctgtcaagcagtttgttcaacgttatgataagctaaaaaaatcatacgatacttcgcgagattttgatgaaaaacagcggttatctgagcagttagttgagctatacgataattacaataaatttagtaaggagattcaaagtaactttgatgttttgctattgcatgaaatgatcactattcaagatagcttttttaactactgccagctcaaaggagtaggtgcaataacagatgagacacgtatagagtatcttgagaaagttttgaaagtaaaagaagaggatctatctcactataaagaaactatcaaacgcaacaaagagtctattgaaaaacttgtaaaagagattaatgactctactggacgggagagagtagttatcaaagacatccgagatttgaagtctttacaagatcttactaatagctacaactatgaaacagaaatgttactccgatggaattatgcagcggctaccgaccagcttcgtatgtacatgcttaaagaatatggggggatttatacagacctagatattatgccacaatactctcaggatgttttgcaaaaaattatggatgttggtgggagtaggttttttgagcatgataagttacggcggactctttcttttgcagctctaaaattaggaagcggtaagcaaacaactgtttcctttgaagaggctaaaaaagctatgactctccccacatttactcttcaggataagagtcaaatttctgaaatttttaaatatctagaaacggaaacgcaagcaaaaaaatcacttttccaaccgatggatgttaccgtcgtccgtgatttcatgcctattttacaacgttatcataagtggcaaacaggatggaatgttcggggattaaatggtttaatgatggctcataaagatagtgctgttgtcgatgctgttattgctcgccagcgagcggcctatgatgagatgcgtgcacttcgtcagaatgttgttagtggagaattttttcgttctcttggagatcttgaacatgtaaatcgtgaaaagaatatcggcggctatttagcgaaaaattatcttgggggcagtctttttttcgattttcgtcaagattcagtgattccaggagctattagtaccttaggaatttcaggtcccgatatcatcatggataccatgagcgattattttacaaatcttggaccagttggagaagattttttatatgaagggaaattaggaaaagcagctttccttggagcttatcaagcacaaaaaactccgaaaggagaacttacctatgattggctccatcctttatccattggagctaatgacgttactcctgctgatgcaagcacctggtgtgaaactcgacagcattgtgccgctgagcttcttttatcggactctatatcctcagacgaacaccctaagggtattcgtcgagaaagagtaaacccgaatgatttctctaaattatggagtaaggaagctcagggaatcctttctagtgatttcgcggatcttttaccacgctttaacttactgatagaatcatctgcgttagatattcatactttatcggctcttgatcgagatatccaacacctttttacaaaagttcaaaaagaccctgtagcatctgtagctgtattttctttacagttacaattagctgaaatgattcgtgcgattcctttccctatacgtaatcaggtacatatcttgcctgaagcacaagcacatttcgaagcagattggaagaaagcaatccaattatatcttcacagtcatccccaaacagaagtggttatttggtacagttctactcatactcaaattgtttttggaaaagatttgcttgctgttgcagaacgagttgcagcagcaaaatccttaatgtctgatcatgatccatcacttataaccagttatctaaaatataaaactcaatctcatcttggggtgcttactgagtttgatcaagaagatttctttgaactgatggtagatattgcagaggaaccagagcttcataaacaactattgaaaatagaagaacaagttaattcaggactctactctcatgtagagcattctttaggagagtggttaaaattatccaaagaagaaagaaaatcaaagtttcttaagattttaaaagaaacgtttcaagaggaggaaagagaagactctcaacaacaacataaaacatggtttgaagaactctatgagaaaagacatcaggagcgcgtaaaggatccagcaaaaaaaatccaagaactaatcacagtttttcaagaaagtcagcgcgttcaagctcaagacatagatacttattttgctcataaaccgttttatcaagatctgatgaaagatggttacgcttttgaggacatttctgtgattacgaagtatcttttagcgagtgacggtgtttcagggattattactactgatcctatatttcctcctccatctaaacagctaattgacgctatgaaacaatctttgggagaagattttggtgagctacactatacgttacagatggtctatgattggttatctaaagagactaacagcgtaacttctgaacaggcaaaacaaaaattaccacagaaactacatgaaaaactagaaggttatacaacacatgatttgcttattccgcctattgatggaagcgtcagcgctttaggattgcgattttccacggaggaggggaaggtatccgatcgcgttttaacaagcatagcacctggagttcctaattctgctagctatgctatgactagttatttgtatggtttgttcttaattacgaaagatatccaaagtggtcgattaacccatgaaatactaaaagagagattacaaacctatggaggcgcctattttatcaatgaatcaaaaattgatgtgctacttgctttatcccggaaaaaagctcagatatccctaatagacgcccataaggctcttacaggtttttcttcttttagcgaagcatctctggctttacttacaggaaggatgcccggaacaagcagagttctatcaagagaagtagagtttggacgaccttcagctatcgttatggaaggagcaacagctattcgtgctcagagttacgatgctgttggattaaggaaagattttttcttgttacctcatacagttccttccatacagtctattgttgagcaagcgaaatatacagtattatcctggccagaattttatgaaaatcatgcggataaatggaacgatcttgctaatcgttttggagctgaggaccttagtgttcatccgcaaacatttttatatgacacagaaggtcgctgtatggggcttgctttactgtatatgttagcagatgactctgtatcctacagattattacaacaaaatctgatgactttagcttcgttatttgatgagcaaaacagaagaaatatccctttaactccagctgatcagaaatttttaaataaggggctttctttaattgagtggttacagttcaaaggaaatcaacaacttcaaacagagggatttttccataccttagactgggatatccctcaattaatgaagcactttgcttcttcaactgtaaaaagttggttaattactacgcctgcgcatagtcttgttctttctttaatggggaatttttttagagtaacagatccaaactatggccatacagactttccttcattagaagctgctattacttttttagaaaggatggttcaagtatccccagctgttttggagcgttatggatttgataaggaaaagtctgtaactagccaactcaaagtccactctttagagacttcagaattgcaaaatgcagtttttgcttcctcagatcttggctttactagtcgctattttacgacaacgttagaagagatgaccgtcagaggccctattacgatgaatcaacgtcacacggattgggccactctttataagattggggggactgttcaaggtaaacgtattgatagtagaacacgggaatcggatttaaattttttaaaaattaatggggatattctagaggaatttttaacaagaactgttctagatagtgacttggtggagttaatacaatctctgctcaaaacacatggccttgagccaggcactacccttattagtccaagttctattgtagagaccgcaatagaccacgtctcgctattacaagcggtgaaaacaaaaacctctcgaatgcacactattttacaaagcctaggagaaagaatttttaaattgtttaaaaattctggggtacaagactcagacaaaatttctatagacagagtccaactagttgatgaatctgatagcgcaacgatagacttcacagtgattaaagataaacagcgttctcagaaaaaaagtattactgttggcatagaaagtttagctggatcctttagaaaatttagcgcatcgatgcacgaagttattggaactggagtgcttgatttagacttaggaatgactgtcgtctctttagttcagtatgtccgtttagtagaagcaggacaaggaaaagatgctttagcagttgctaatttagtgatgaatcttaaaatagctctcgaggtctctatagggaatgtaattcaggctctgggtaaaaaactgctcactcaggaggggcttaatactttccgtttagaaacagaattagctcgtcaactacacaaagtgggagcacgagttggaggaactgttggtaagacgttaaccagagtagcgcatgtattagaactccccatattagaaagtgcaattggaacatggaacctctataatagtgtgaacgagttattacatgctgattcttggagtgaccaggttgctgctagagtacaagtagcttttgattcaatctctttaggaatcactatagcttcggttgtttctccagcacttatgatggcagcaggccccattgctgccatagggatgggggcagcatccattgctcgtaatgttgccagaaaagaagagcggcactctcaatggctcaagtacaagagttttcttgataatggatcaaaacatacagttgccgcattccctcataaagggcttatagatttatctgagaatttagtacttgggaacattgtgctgaatttaagggtttacccacctctgcttacaggcgatcgctcttataatgcaaatcggtggtttgggaataagcctggatggtctgattggcaagttcgagaaagattaggttatgcctatcgaagcagtccatcttatgcgttagccagaggacacgctaatagtttttggccactatctatgcctagtattgataaaggtgtatatcgcacagtaattctaggatatggcattcaatataaagcggttacagaagttgtctacttgtctaatgaaatggtttggagagaagctgtgatgcagtttgactctcgatactatgtagagccattaacagcggaaaaggagtgtgcaacagtactagcaggagatacgccactatcagtgattcctgtacgtttattagaagaggagtctctggaacgcgagaagaacgcggcttcttataagaactatcagatcattattgagggagggaaaggaggacttactgtacagataggaggagcaggttattacaagttaacagcacagccaggaaaagggaatatcctctctttccgagcaatacctggatatctttctgtaacgtttgatcttagccgattggaacaagaggtgcctctcaccaaacaaaatggaacagccttaaagatacttaaagtacgtcaaactgggtttgatactattgttggatcttcaggaggtagtgataatttaacaggcaatcacaatacaaaattttatctaagcaccggaggaggacatgtcacctcaggatccggtaagaactggtataacattccatctttaacacgtagccttggttttgattttacttctaatgctatagagcataaggcttctgtagagatgcttttagcagatttctctcctgctaataatttaagtttaatagttgaacgatttgcaaatgttagcattcatgtttttaattatagcaataaaacagccccttatactgtgaatttgaaagacggggtgtctttacaagcttctaagcaaggctttagcggtagtttattagaggtggcttcctttgatcaaacgctatggcaaaagagctatccagaagatagaggatttgtagaagatattttatcttggttattaaaactgcaatggtcgttagcttctcgagtaaggatctttttacagggaggcacagcacaatacgaaacaacgcagaaaagtcttatttatagacctgatccacactcaagtatatctattcaggctacagattcttataatacacaagtttatggtaacgttggctgttcttatattctattctcttcaccaggtgtgaccgccaaaacactcgatattttgttattcgaagattcggggttaccacaaattattgacttaagcacacttgttccaacttctatccaagggttcctctatccaggagggtttataaactttcaagtctcttctgcaagatatgcatttcctttttctgtcagttggagaaggcatcattacactttccctgctcaaacgattattcaagttctacctcgcttgcggtttgaactaggggattggtttacaattttgcaaaagagtgtaggaaaatgggtaacattgtaccaacacgacatgattatccctgaacgtattgaaggtgttttaagtctaaataacacagcgacattaatgtcacaccacaatcaaacaacccatatgcttggagtagaaaacaggggagatttgagtctaaaagttttaggaatactccaatctggtcaaattaaaggatctaaatcggaaaatagcgcgagtggtcatttttctaaattgttatctgtcccagcacatacgatcaaaaatctttcgtttaaagaggaagagggaactaagagtaaaaatattttattctacagtgtgctggaggaaacattccttaaagctacagataaacctttaactattattaaacgtgataaatggtctctgtatgatgaaatccaagtatttgcaacaactcttaatctgcaaaatttcttgcgttatcatatttcggaagagactccaatgttatctagactgctcatgtatgcgcagaaacgcgtttccatccaaaatagagatctcgcattgaaatttttctatgttcgagagcgaagtggtattggtgcaattagattggtattcaagaactttttcgaagagagcttgcaggggatattacatggaaccttagagcgagaagttaaacctatgctagctgaaaatccaaatacactaattcattcatcgtatcggaatcatttagaactcatcctaggggaggaaaccttagatctcgcaattatcgttcaagagtttagctcttcaaaaaatattgttgagttgcaaaaagatctagcaacccatcggcttatttatcctcaaggaaaagaagccttgtctcttgcaatctatacccatactttcagtaaagagagcttagtcacatctaaacaacgaagcgaagggttaaaattcatcgatccatcaatgcaggaatatcgtttacctgagacaacgattctcgaaaactcttattatttagacccttccacaggagatttgtatttaacaaagataattgcgcaaccttcacaaagtagagcatttcttatcaaatttaaaaaatacaaacgccactggctagatttccaaaaattagttctttctggatctcatttagaacttatcgcatctactggaacagctttaacatttgtaggccccgaattacggcatttagagattgacttcccaggcgcgttaaatgggactattgccaaagaacacatctcatctcgggcaagtattgtaatcccaacaaacaatcaggtgacacactatgacccaagaatagcgaagcagcattatagctctatcaattatatgctgtgggatctgcgtgatcgtgcgacactatctaagcgagcaaaaactttagatagctatttgttagaagtttgtatgaacttagactcttctaatccaacgtggaatattccaaatgatgtgttgaactacgcggtaggatattatcgaacaatccttcctagctgggtaaaaaataaaatccgtgtaggttccttaattaaagtagaagctgatactgcaaaaactttgagtttctcactaattacgacacaaaatgatctattccaacctgtagtggataaaggattctatatttactacagcgtttcgaaactagccaatcatgttaaactgcgaaatgttactggagatatgttgcttgatatcgataaggaaaccacatttattgttcgaggagtagatgaatctgattatgataagaaacaaatctatgttgttttagatctgacaacagaagaagaacgtaaattgcgaacggataagaacatcattattattcctggaggagaacgattgaaccgatga

SEQ ID NO: 73 - DNA, 363 bp, Chlamydia muridarum
atgtttatttcttttgataaaactttatctagacattctacggatttggcagaagcttttggaaacaagcttctctatcctgtgacccaaggatttggaacccgtatttcagtaaagcctgttttagtaatcgatgatatgacgatccatggcttctcagtgaaacaagagtctctttgtaagcgaatctgttgtgttatagcgtgtatcttattggcgcccattgtccttctaatgacccttatcggagtcatagcatataactgttcagctacttataaaagagtacaagatctttatcttgcaactggtttagaatttggaaaagaatggggtccgtggacgtgcgcgccacaaatataa

SEQ ID NO: 74 - DNA, 1584 bp, Chlamydia muridarum
atgcctaaaaaaaagtttttatatatcttgatccccttcttgagccttacttttggcttaacgtcttgtcaccagaaagaagaaaacctaagaaatattttgcgtgttgctatttgccacgatccaatgtctttagatcctcgccaagtttttttgattaaagatgtttgtatagcaaaagcactttatgaaggattggttcgagaaaatgatggcagtcttcatttggctctagcagaaagatacagcttgtcccaggatcggtgtgtctacactttttttctaaaaaaaactttttggcataacggagatcttgtaacagcatatgattttgaagagtctataaagcaattttatctccatgaggttgataatgttgcgttacgattgcttgcgttaattaaaaattctcatgctgttctaaaaggagacattcctgttgaaaatttaggtgttcgcgctttagatgaacatactcttgaaatcactctagaacacccctcttctcattttttagaaactctcacacatcccgttttttatccagtgcatgcttctttgagagaatattatagaaatcgaagtaaacgctctcttccaataatttctaacgggccttttatcattcggtgttatgagccacaaaattttttgttgcttgataaaaatcctttttatcatgaccaaaaaaatgtttctttagatgctgtacgcttacaaatagttcccgatattcatacagcggtgcaattgtttcaaaaaaaatatgtggatttagtggggttgccttggagctcctccttccctctagaagaacaaaaaaatctttctcaagattttttgtatgattatccggtgctaaattgcacagttctattctgcaatgttaaccacaaaccattagataatccttcgctaagagcggcactctctttagccattgatcgagaaacattattaaaattagctggcaaaggaagcattgctaccagttttgtacatcctagtctatctaagatgcctttagatgttctttcgcaaaaagagagaatctctttagctaaaaattacctagcggaagctttaaaaactgttcctcaagaagagttaaaaaaaatcacactcatctaccccatagaatctattgtcttgcgagcagttgttcaagagattcgtcaacagttatttgatgttttaggatttaagatttctactttaggattagaataccacagttttttggataaacgttctaaaggagagttttctttatcaacaggaaattgggttgctgattatcaacaagccaaagcttttctatccatccttggtaatgggactaaatataaagattatcaagtgattgattggcaaaatcaagaatatacggatatcgtatctcgacttttggttgaggattcaacagatttacaaattctagcagaacaactattgctcaaagaatcccctcttattcccctttatcacttggattatgcttacgctaaacatcctaaagtctctaatctccaaacctcctcactcggagaaattgatttaaaaagagtctcgttagtggagtaa

SEQ ID NO: 75 - DNA, 714 bp, Chlamydia muridarum
atgaatcagaggattcctttgaggaaaaagatccttattattgttacagcattgggatttgtttcatgcgtgggcttgatggtgcaaacaaaacgctctattatgccgccaaaagcacatatacccaccacagcaaaatattttcctacaatagggaatccttatgcacccattaatattactgtgtttgaagagccttcttgttctgcgtgtgaggagttttcttcagaagtctttcctttgatcaaaaaacgctttattgataccggggaagcctctttcactttgattccggtctgttttattagaggatcaatgcccgctgcacaggctttgctttgtgtctatcatcatgatcctaaacgacctgatccagaagcctatatggagtattttcacagaatccttactcataaaaaaacagaaggatcacactgggctactactgaagttcttacgaaattagcagaaaatattcctacgcattctggtagagaaattaatcctacagggttgatgcaatgtgtaaattcgcagaaatttgcggaacagctaaaaaagaacaatatttatggatctcaagtcatgggtggtcaacttgctactcccacagcaatagtgggggactatcttattgaggatccaacgtttgatgaaattgaaagagtaattactcaactgcgtcatttacaagcaatggaagaggaggaatag

SEQ ID NO: 76 - DNA, 729 bp, Chlamydia muridarum
ttggtttttattgttattatgctttctaagttctacaaactttctttatctgctgttttattgatcaacatgttctctcctgtagaggttttttctgccgaggggacaacaggttttattggtcgaatgaaatcgtggatctcaggagaaaagactagtctcccaactacagaggatttgcagacttctgctattacaaaagtctcagaccttttgtcttggaagcgctacgattatacgcaggaaggcggcttttctgttcagttcccggagttcccggagcattcagggcagattgtggagattcctcaatcagacttagctatccgttatgacacgtatgtggcagaaactcctaatgatagcacggtttatgtagtatctgtttgggaatacccagaaaaggtggatataagcaagccggagttgaatctacaagaaggtttttcaggaatgctatatgcacttcctgaatcacaagtgttatatcttaaagcaacagaagtacaagggcataaggctctagaattttgggttgcctgtgaagatgtatatttccgagggatgcttgtttctgtaaaccacaccttatatcaagtatttatggtttacaaagggcgttctccagaagttttggataaggagtacaatatctttattcaatctttcaaagtcacaaaggttagaaattccaaaaaaatggatataaggaaaagggtgtccttataa

SEQ ID NO: 77 - DNA, 717 bp, Chlamydia muridarum
atggtcaatagtgttaatgctttttaccaaaaagaggtgaatgcctcgccaattagcagagaagaatgtgtagggaaaagcaacagcaaggtcttttctaagggtgcttgttgcgcaaaaattattggagttgctttggccgttttaggtctagctcttgctattggtggagcggttttacttggtgttggatctctatcttgtctgcttcctgtatttgtccccatagcgatgattgctgttggggttgttcttttaggattagggagtgttaatgcctgcttgagttccccacgaacagttaaagtagcggataagctggggaatcagcaaattcgcattttaaggaatcgtgtttgtcaattagaaaatcaagtagtggcttcccgcgctcggttatcagccttagaagatgaacttacagagcagcagtacattacgaacgcttttcagactgccttggaagcgggggaggatggagttccttgtggcaagatgaccgctaagatgaaaatggatgctgctaactctgagattttatgtcgtgtgagagaaataaccctgatgggacaagctttaaaccaagcattggatagaatccaactcctccgtaatcagctacggactagttctcgatacattgttggatcggaagaggagtgtacgccgttgttagacgcagaagaaacttgttgttctctggattcaatttgctaa

SEQ ID NO: 78 - DNA, 645 bp, Chlamydia muridarum
atgagttgttctatcggtagtacacaaacacttaacacccatttccaagggatagccgatagtctggctaattgtacaggtaaaattcgggaaacatgctcttcaagagtaagtgcgagggttatgggagcggccttggctgtcatcgggcttttggttgctgctgctgggattgtggttgctgctgctggacttgggtgtgcagttcctctggctatagggttaattttagtaataatagggtctgttcttttgggactgggccttgctaagacgcgaagccgtcgttcagagttggagcagcagcttgcagctgtttttagtcgaattgagtatcttaaagaggagcataaaaatttgaatgaggtttatgctttgaactgtgaagctcgtaaaagtgtaagtcaacactgccagtcattagagaagcaaatatgggatttatgcaagaaacatgctgataccataagcgttcttgaagaagatgctcggcaagataaagagcgatgcgtaagttgttttcagaagcaattgaaacagagtcaagatacttgcgagcgattaactagagcattatgtaatgctaaaaatcagtgtgctgaattagagaaagaattggcttgtgttaaagctaagaagaagtaa

SEQ ID NO: 79 - DNA, 2379 bp, Chlamydia muridarum
atgcttggaatacgaaaaaaaacgattctgcaactcgctattttactgttgctccccttttcacaaaacgcctttggaacatctcctgaaggacgtatggtggtacaatccatcactattgagactcgaggagaaaatgctcaaaataagcgggctattcccaaaataaagacaaagcaagggacgctgttctctcaaactgattttgacgaagatctaagaactctctcgaaagatttcgaccgcattgatcctattgtagagtttcgcaatgggcaagctgttatttcccttattctgacagcaaaacccgttatccgacacattaacatctcagggaatgaagcaattcctactcataaaattttaaaaaccctagagctttataaaaacgatctttttgatcgagaggtttttttcaaaaattttgatgctttaagaaccctttacttaaaacgcggatactacgattctcaattgtcctattctcacgatcataatgagcaagaaggttatattgatatctcaatccaaattaaagaagggccctacggacggataaaaaaattaacaatttcaggtattactcgtacagaagcctctgatttgggagacatagttttaaccaaacagtactctacaacaacaagttggttcactggagcaggggtataccatccagacatggtggaccaggatctctttgccataacaaactattttcaaaataaaggttatgcagacgcaaaagtcacaaaagaagtctccacagatgctaaaggaaacctctctcttgttatcaacgtagataaagggcccctgtatactttaggtcacgtacatatagaaggtttcacagctttatccaagcggttacttgataaacaactgttagtgggccccaattccttatattgcccagaaaaagtttgggctggagctcaaaaaatccgtaatgcctacgctagatacggatatgtaaataccaatgtagacgtatcttttgctgttcatccaacgctcccagtttatgatgttacttacagggttagcgaaggagctccttacaaaatcggactaatcaaaatcaaagggaacacacacaccaaacatgacgtaattttacatgagacaagtctgttccctggagatacttttgatagattaaaactagaagatacggaaactcgattacgtaacacaggctactttaaaagtgtgagtgtctacacggtacgctcacaattagatcctttggactcaaataacctttatagagacgttttcattgaagtcaaagaaaccgaaacaggtaacctaggactgttcttaggattcagttctatagaccatctgttcggaggagcagaaatttcagaaagcaattttgatttatttggcgcccgacacttattcaaaaaagggtttaaatccttaagaggtggtggggaatatcttttcttaaaagccaatttaggagacaaagttactgattatactgttaaatggacaaaacctcatttcttaaacaccccatggatcctaggagtagaattagataaatctattaataaggctttatcaaaagattattccgttgatacctatggaggaaacatcagcacgacatacattcttaacgacaaactgaaatatgggatgtattaccgcgggagccaaacgagcctaagtttaagaaaaaaaacagaaaatcctaacaaacctggaccagatctagatagtaacaagggatttgtttccgcggcagggcttaacgttctttacgattctattgacaatcctagaaaacctactatgggtattcggagctctttgaactttgagttgtctggattaggaggaacctatcagtttacaaaattaacagccagcggctctatctatcgcctgctaactaaaaaaggtgttttgaaaattcgtggagaagctaagtttattaaacctttcggtacaaccacagcccaaggaattcctgttagtgagcgcttcttcttaggaggagaatctaccgttcgtggatataaaccatttattattgggcctaaattttctccaacagagcctcaagggggcttatcttccttattgctaacagaagagtttcaatatcctctaatttctcaacccagcatcaatgcattcgtttttctagattcgggctttattggcacggaagagtacactattcgactcaaaaatctctgtagcagtgccggatttgggttgcgttttgatatgatgaataacgtgcccattatgttaggttggggttggcctttccgcccaacagaaattcttaataatgaaaaaattgatgtatctcaaagattcttcttcgctttgggaggagtgttctag

SEQ ID NO: 80 - DNA, 522 bp, Chlamydia muridarum
atgaaaaagttcttattgcttagcttaatgtccttggcttcttcaaccgtgtttgcagcaagttctacaaatacaattggaattgttaacctacgtcgctgcctagaagaatctgaactaggcaaaaaagaatctgcagaatttgaaaaaatgaaaaatcagttctctaacagcatagggaaaatggaagaggaactgtcttctatttattctaaactgcaggacgacgattacatggaagggctatccgaatctgcggcagctgaattaagaaaaaaattcgaggagctatcttcagaatacaacacagctcaggggcagtattaccaaatactaaatcagaacaacctcaaacgcatgcaaaaaattatggaagctgtgaaaaaagcctctgaggttgttcgaatccaagaaggcctttcagcgcttcttaatgaagatattgtcttagctattgatacctcttcagacaaaacggatgctgttattaaaattcttgatgattcttttcaaaataattaa

SEQ ID NO: 81 - DNA, 2364 bp, Chlamydia muridarum
atgagaatgaataaacgaacgttattatttgtttccttagtgagcgcagcatttttgggctgccagattttctttgggtatcaggatttgaaatcttgtcaggatctggcggaaaaacagcgtgctatttctgagcaaatattagcttcaacagagcagttgagtgtagttccttggacggcttctgcagaagaaagcgaatcggttaatcaatatgctgttcgtttagggaatcgacttctcgttttaacaaaaggaggagctcattctgaggtacattctaaaggaacctcctggaagctaatagatcaaactagtaccttcggggggattctggtttctttgtatggagaggatgggcaggaggttttatcaaaaggcggttccgtatatctccctaatcaacaagatgcactccctgttttagtggccgagtttcgcagaaaccaagaacctcttgtgtttttcggagagtataaaaatggcaagctttctaacaaagcagggactatctatgggacttcgttagtttttcttaatacagggaatgaatttgttcctttaggcatttacaattctaaagaagagtgtgtggaatctctggatcttcctatggcaagagctgtagtttttgccgataaagagaacctgacaacgtcaggcagttattacatgctcgctaatgaatatatgcaagttatagtctctcaggaaagtggagctattgaggggattaatcttccttttgcttctgatcgagaagggaataagagcattgtcaatgaaattggatttgatagagaattagcagccggctctccatctgaggcttctttccctggagttcaagctattgattctcagcgtcaaaatgtatcgagtgttgtaggtggatactatcctttgcttagacgagggactctatctgataccagaaaaatggtttcccctcagtatcaagccttaaacatagtctctgggagagagttgtcttctcctgtcgcaacgggttttcgtgtagtttcgtttgataataaaacgttagttttggaaagcggggatgggggcattcggaaaacgtatacccttggagaacaaccttacgcttttgaccttgaaattcaaactactagaggacaagaagacttatggataacttcaggagtgcctgaagttgagatcatgtctaatgcttttgtccctgcagttaagtatcatgcagtgaaaaaaaataagagtgacctcattaatgtgaagttacccaaagcaaaagactctttgttagtacgtaatgacgcttcccctcaatggattttaaattccaatggatactttggagtcattcttactccgaagacccctcttcctacgggatatgcttcttctttcattcctgggaatgcagttcctacgcgacttactcaactttccccaaaagatcaggcttacccagcttcgaaatatcctggttatactgcaatgcttcctttgcctaaagaagctggccgttatcagtttatggtgtatgcgggtcctttatcagagcctactttgaaggctttagatcgagctcacacgaatcataagggagagtctcctgagtatgttgatgcgattgcatttagaggtttctttagttttataacagaaccttttgcagctttgttatttattataatgaaatttttccaatttctaactggatcttggggaatttcgattattttattaacgattgtacttaagcttgtgctttatcccttgaatgcttggtctattcgatctatgcgtcgtatgcaaaagttatctccatatattcaagatattcagcagaaatacaagcgagagcctaagcgagcacaaatggaaattatggccttgtataaggtcaataaagttaatccaataacaggctgtcttcctctaattattcagatcccatttcttatagcaatgttcgatcttctgaaatcttcgtttttattgagaggagcgagctttattcctggatggattgataatttaactgctccagatgttcttttttcttgggaaaccccaatatggttcattggaaaggaattccatctccttcctattttgttgggtattgttatgttcgctcaacaaaagatttctgctattaaaagatctgggcctgtttcggatcaacagcgtcagcaagaggctatggggactatgatggcgctattatttactttcatgttttataatttcccttcagggttaaatatttactggctttcttccatgttactcggcgttattcaacagtgggcaacaaataaaattttggatgaaaaacatttacagcatgaagtgattgttaataagaagagatag

SEQ ID NO: 82 - DNA, 480 bp, Chlamydia muridarum
atgacgacatggactttaaatcaaaataatctcacaaaatttctaaaccatgctcagttagagccctctttggaacgagaaagcggcctaacttacattacgatctccgctggagaacatgaacttcctctgtttttcgttattcgtaacgagggagaagtcttacaacttgtctgctacttcccttatcaaatacaagaaggccaacgagatgccacagcaagacttttacaccttgttaatagagacattgacattccaggatttggaatggacgaagaacaaaacattattttctatcgactagtcatcccttgtttaaaaggggagattaatgaaaacttgctacgagtttatatagatacgattaaattaatttgtgacagctttttccatgccatagggttgatctcgacagggaatatggatctcgatgaattaaaaaaacaagcgaaccaggaaaataatcaaactaattaa

SEQ ID NO: 83 - DNA, 807 bp, Chlamydia muridarum
ttgcagggaagggacatgaggtatatcagatcttcaaacatcagacgattgtctttgatgatcgagaggttgtgtgtgaagctttggcctcgatttattaattcaaaattcttgtttttactgcttgctttgggtgtcggtccggataagtgtttttcggatgctgtaaatactcctgttgttcccaaggtaagtcgaaatgagcttattgtgatagatcctggccatggtggtaaggatgaaggaactgcggataaggagctgcgatataaagagaagtctttagctttatcaatagctttaagtgtgcaggggtatctacgccgaatgggatataagacgatcatgacaagatccacagatgtttatgtggatttgaataagcgagcggcgatagcaaaccaaaacaaagcagatgtttttgttagtatccattgtaattactcctctaatacctctgctttaggtacagaggtctatttttataatgataaaaatgtattgagaactaaaaaatcagagaaccttgggaaatcgattctagctttcatgcaaaagaatggggctttgcgggagcgtaaggttaaagagggtaattttgcagttatccgagaaacctccatgcctgcggtcctggtagaaacagggttcctctctaatccaaaagagcgagcagctcttttagactcccgttatcgttcgcatttagctaaaggtatttctgaaggaatacatgcctttattcttaatcgacagattaaaaagactacagcggggaattcgggagtaaaaaaagtgtataaataa

SEQ ID NO: 84 - DNA, 957 bp, Chlamydia muridarum
atggcatccaagtctcgtcattatcttaaccagccttggtacattatcttattcatctttgttcttagtctggttgctggtacccttctttcttcagtttcctatgttctatctccaatccaaaaacaagctgcagaatttgatcgtaatcagcaaatgttgatggccgcacaaattatttcctatgacaataaattccaaatatatgctgaaggggattggcaacctgctgtctataatacaaaaaaacagatactagaaaaaagctcttccactccaccacaagtgactgtggcgactctatgctcttattttcaaaattttgttagagttttgcttacagactcccaagggaatctttcttcttttgaagatcacaatcttaacctagaagagttcttatcccaccccacatcttcagtacaagatcactctctgcatgtaatttatgctattctagcaaacgatgaatcctctaaaaagttatcatcctcccaagtagcaaaaaatccggtatccatagagtctattattcttcctataaaaggatttggtttatggggaccaatctatggatttcttgctttagaaaaggacggtaatacggttctagggacatgctggtatcaacatggtgagactccaggattaggagcaaatataactaatccccaatggcaacaaaatttcagaggaaaaaaagtatttctcgcttcctcttccggagaaaccgattttgctaaaacaactctaggactagaagttataaaaggatctgtttctgcattattaggggactctcccaaagctaattccgctgttgatggaatttcaggagctacactgacctgtaatggagttactgaagcttttgctaattcgctagctccttaccgccccttattgactttcttcgccaatcttaactctagtggagaatctcatgacaaccaataa

SEQ ID NO: 85 - DNA, 2073 bp, Chlamydia muridarum
ttgttagcgttttttaacaaacatcaaaagaaatttatcggattagttatcgctggcgtttgtttatctggagttggcgtaggtattggtcagacctttaaaaaaacgcaaaaattcgggtctaacaaaaccgtttataaaactccatcgggtagaaaatactctgaaaaagaattttttcttttaaaacggtttttatctaacgaagcttatccttttactggtaatcccaaagaatggaattttcttaatgaaggggtattaacggagcgtttcttaacgaataaattaggagagaaattatttcttagtgtgtacaagtcagggttccctgctttcgataaggaacggagctatgaggggtatcggcgttttgatgctccttttatttcttctgaagaagtttggaaatcctccgctcctcaattacgagatgcttttcatatattccaacaattagaaaacccagtttctccggaagggtttgctgctagagtaaggttattcttagaagaaaaaaaattccctcattatgtccttagacaaatgttagaatatcgtcgccagatgtttaatcttccggtagacggctctttggcgcaaggccgggacttgcgtttgtttggatatcgtaatattaaagattggtttggagataggtatgtttctgcagtaacagaagcggtgttacgtttcatagatgagcagaaaaagaacatcgcaatgccatctttgaaagaagctcagcaggatttctatgataaagcacaacaggctttcttgagactcagtaggcatgcggagtttaatctgacattagatcagctagtttcttctttttactcttttatgggagttgaagaagcagagtttatccgtatgtatcgagaaattttgttatataaaagagctcttttagcattggaaggtgctgttgcctttgacttctatcctttacagaaattcttttctatggggaaagatacggtctctgtagaaatgtttcatttaccagaaactttagtctttaaggataaagaagatttagaggcttttgagacatatctcagtttagtagccgcgccttcgagtcatatcttagacgttcaaacgaaattgcttcctatcgaaaaggtaaaaagcaaagctgagtgtttggtagggaagagattttctgtttgttatcgacgtgtgaaactctcggaacttgaaaaatatatccctatggctcaggtataccagtggtatcagaatcccgagaatttcgaagaaattttattagagtttcctgaactagagacgtgttcttctcttcgtgatgtcttgaatttgaaaccagcaatcgtagagagagcgcattcttatgtaaggaaggcgattcttcgagctgatttaggaatcattcagtctgagttagctaagcaagagcaaaaagaagaggagcttttcttatctttagggccagatcatctattgcctggcattcaaaatggagttcgtctggctaacgttttgatgcagcaagattccgttgattactatacacaggacgatgaatatttttattctatcattgtaaaaaatcgtactggtacggatgaggtattgccttataaggaagtagttcgtaaggggctgaagaaagttttgctagaacgttataaagcagaagagcgcattactagggtcttggctcatttacaagaggctttccctaattgtcagggcaaggatctctatcaaagacgtttaattagatttgttaagtcgcttcaatctggaagattttctcaaggagatctgttctggggattggagaaaactgtgaagacgttttctagaggagatcaaggagtccctcaagagtttgaagaaatgctggccttgaaagaagggcaagtatcggatgtattatttgattcggataaaggtcctttctattatacctttatctcaaaaacttattgcgattatccggtaagtttagacaaattgctgtttgcaaaaaatcatttgaatgaagagcttttaagaccttatttatcagagatttttttccaaaacgagagttag

SEQ ID NO: 86 - DNA, 384 bp, Chlamydia muridarum
ttgggaaacgctttcaataatccctttatttttagagacattaatatgaacaacattacattatctgcaagctcttcttctttaaattctgaaccagatcgtcctcaagaaaaagtcaacccccatttgctttttattttggccttaattcctgttatagggctaggtgttgcgctttatttatgtattaaaacaacagatgttcactggaaaagcaatgctggggttgctgtcctcggaggattaggaattttagccatcgcctacatcttaatacagactctattggtaattcgtctggcttttaagaaaattaataattttcttcaccatcctactttgccttgctgtatttccttttcgtgtaaaacaaaaacagagtag

SEQ ID NO: 87 - DNA, 1776 bp, Chlamydia muridarum
atggtagcaacttcaaaacaaacgacgcagggctatgtcgtagaagcttacggaaatttattgcgggtgcattttgatgggcatgtgcgtcaaggagaagtggcctatgtcagcgtggatgatacttggttgaaagcggaaattatagaagttgtgggagatgaggttaaagtccaagtttttgaggaaactcaaggaatttctcgaggcgctttggtaactttttccgggcatttattagaagcggaacttgggcccggtctattgcaaggtatttttgacggacttcagaatcgcttagaggtattggcagatacaagcttgttcttgaaaagaggggagtatgttaatgccatttgtcgggaaactgtatgggcttatacgcaaaaggcttctgtcggggatgttctatctcggggagatgtgcttggtacagtaaaggaagggcggtttgatcataaaatcatggttcctttctcttgttttgaggaagtgactatcacttgggtcatttcttcaggagattacactgttgataccgttattgctaaaggacgtactgcttcaggagccgagcttgaatttacaatggttcagaaatggcccattaaacaggcttttttagaaggggaaaaggtaccgtctcatgaaattatggatgttgggttacgagtattagatactcagatccccgtcttaaagggaggaactttttgtactccagggccttttggtgcaggaaagaccgttttacagcaccatttatctaagtatgcagctgtagatatcgtagttttgtgtgcttgtggagagcgagctggagaggttgtagaaattcttcaggagttcccgcatttgacagatcctcatacggggcagtctttgatgcataggacctgtattatttgtaatacatcttccatgcctgtagcagctagagagtcctccatttatttgggtattactatagcagaatattaccgtcaaatggggttgcatgttttgttattggctgactcgacatctagatgggctcaagctttaagggaaatttcagggcgattagaagaaatccctggagaagaagctttcccagcctatttggcgtctcgaatagcagctttttatgagcgaggcggggctgtgaaaatgaaagatggatcggaaggctccttgactatctgtggagcggtttctcccgcaggaggaaattttgaagagcctgttacacaagcaactttatctgttgttggggctttctgtgggctttctaaggctagagcagatgctagacggtatccttctattgatccgatgatttcatggtctaagtacttggattctgtggcggagattttagagaaaaaagttccaggatggggagattccgttaaaaaagcttctcgtttcttagaagaaggagcagaaattggtaagcgaatagaagttgttggggaagaagggatttctatggaagatatagaaatctttttgaaatcagagttgtatgatttctgttacttacagcaaaacgctttcgatgcagaggactgttattgtccttttgatcgtcaaatagagcttttttctttaatgagtcatatttttagctctagattctgttttgattgtccagataatgctcggagtttctttttagagcttcaaagtaaaattaaaacgctgaatggtcaaaaattcctttctgaagactatcagaaggggctagaagtgatctataaactattagaaagcaaaatggtgcagacggcgtag

SEQ ID NO: 88 - DNA, 4191 bp, Chlamydia muridarum
atgttcaaagaaggttctcgagacgatgcagccctagcaaaagaagggttgtttgataagttagaaattgggattgcttcagatgtgactattcgcgacaagtggtcttgtggcgaaattaagaaacctgagacgatcaattatcgcacattcaagcctgaaaaaggcggattgttttgtgagaagattttcggtcctactaaggactgggaatgttactgcggtaaatacaagaagattaagcacaaaggtattgtgtgtgatcgttgcggagtggaagtcacgctgtctaaggtgcgacgagaaagaatggctcatattgaattagctgttcctattgttcacatttggtttttcaaaactactccatctagaattggtaatgttttgggaatgacagcttcggatttggagcgtgtaatttactacgaagaatacgttgtcattgatccaggtaatactgatcttgtgaaaaaacaacttctgaatgatgcaaaatatcgagaagttgttgagaaatggggtaaagatgcttttgtcgccaaaatggggggagaagctgtttatgatcttcttaaatccgaggatttagaaagcctccttggtgagcttaaagatcgtttgagaaaaacaaaatcccagcaagcaagaatgaagcttgctaagcggttgaagattgtagaagggtttgtatcttcctctaaccgtccagaatggatggtcttgaagaacatccctgttgttccaccagatcttcgtcctttagttccattggatggagggcgttttgctacttcagatctgaacgatttatatcgtagggttattaatcgaaataatcgtttgaaagctatcttgcgcttgaagactcctgaggtaattgttcgcaatgagaaacggatgttacaggaagctgtggatgctctgtttgataatggacgtcatggacatcctgttatgggagcaggaaatagaccccttaagtctctatcagagatgttaaaagggaaaaatggtcgtttccgacaaaacttattaggtaaacgagtagactactctggccgttctgttattattgttggtcccgagttgaagtttaatcaatgtggtttgcccaaagaaatggcgttagagttgttcgagccattcattatcaagcgactaaaagatcagggtagtgtttatactatccgttcagcaaagaaaatgattcaacgaggcgcaccagaggtttgggacgttcttgaggaaatcattaaaggacacccagtcttattgaaccgagctcctactttgcaccgattgggaatacaggcttttgagccagtgttgattgaagggaaagcgattcgggttcacccattagtgtgtgcagcgtttaacgccgatttcgatggagaccaaatggcggttcacgtgcctctttctattgaagctcagttagaggcgaaggtgttaatgatggctcctgataacattttcttgccatcttctggaaaacctgttgccacaccttctaaggatatgacattgggcatctattatttgatggctgatccaacgtattttcctgaagaacacggagggaaaactaaagtatttaaagatgaagtagaagtacttcgtgctttgaatgctggaggttttatccttaaggatgagatatgtggttctcgtcgggatgaaactggacgagggattcatattcatgaagccattaaagttcgaattgatggtcaaattattgagaccactcctggccgcgtatttttcaacacaatcgttcctaaagaacttggcttccaaaactatagtatgccaagtaaacgtatcagtgagctaatcttgcaatgctataagaaagttggtttagaagctactgtacgctttttggatgatttgaaagagctaggtttcgtgcaatctacgaaagctgcaatttctatgggattgaaggatgttcgaattcctgaaattaagaaagagattttgaaagacgcttacgataaggttgctgtcgttaagaaacaatatgaagacggtattattaccgatggggagcggcattccaagacaattagtatctggactgaagtttccgatcttttatctaatgcgttgtatgctgagatcaaaaagcaaaccaatagcaaacataatccgctgttcttaatgattgattctggagctagaggaaacaaatctcagttgaaacagcttggagctttgcggggattgatggctaaacctaacggagccattattgaatctccaattacttctaacttccgagaaggattgacagtgcttgagtactctatttcttctcacggagctagaaaaggattagcagacacagcgcttaaaactgcggattccggatatttaacccgtcgtttggtggacgttgctcaggatgttatcattacagaaaaagattgtggtacattgaatcatattgaggtgtcgacaatccgtcaggggtctgaagaattactgcctttgaaagaccgtatttatggacgtacagtttctgaaaatgtctatcagccaggagataaaagtaacgttttagcctatgctggggatgtattaacttcttcccaagctgaggctattgatgatgcaggtattgatagcgtaaaaatccgatctacgcttacttgtgaaagccggcgaggagtttgtgccaagtgttatggtttgaaccttgctaatggccggctgattggattaggagaagctgttggtattattgctgctcaatccattggggaacctggaactcagttaacaatgagaacgttccaccttggggggattgctgcgacatcctcaactccagaaatcgttgccgagtgtgatggaattcttgtttacttagacttacgctttgttgtagaccaagaaggtaataatcttgttctgaataagatgggagctcttcacttggtccgtgacgaaggacgaagtttgagtgaatacaagaagcttttgagtacgaagtccatcgaaagcttagcgacattcccagtagaattgggagctaagattttggttgatgacggtgcagctgtcacggccggacaaagaattgctgaagttgagctccacaatatcccaattatctgtgataagccaggattcgttcactatgaagatttagtggaaggagtttccacagagaaagtcacgaataagaacacgggtcttgtcgaattaattgtgaaacaacacaggggagaattgcatcctcagattgctatatatgctgacgccaatatgcaggaattggttggtacatatgccattccttctggggctattatctctgttgaagaggggcaacgtattgctccaggaatgttgttagcgagattgcctcgaggagcaattaaaacgaaggatattactggtggtttgcctagggttgcagagttagtagaagctcgtaagcctgaagatgccgcggatattgctaagattgatggggttgtagacttcaaaggtatccagaagaataagcgtattcttgttgtgcgtgatgaagttacgggaatggaagaagagcatctgatttctttgaccaaacacttgatcgtgcaacgtggagatagcgtaatcaaaggtcagcagttaacggacggtttagtcgttcctcatgaaattcttgaaatttgtggggttcgtgaattgcagaaatatttggttaatgaggttcaagaagtataccgactgcaaggtgtggacattaatgacaaacacattgaaattattgttcgacagatgttgcagaaagtgcgtattactgatccaggtgatacaaccttgttgttcggagaggatgtcgataagaaagagttttatgaagaaaaccgccgtacggaagaggatggagggaaacctgctcaagctgttccagtgctgcttggaatcactaaagcttctttgggaacggagtcctttatttccgcggcctcattccaggacacaactcgagttttaacagatgctgcttgcagtagtaagacagattatctgctaggattcaaagagaatgtgattatggggcacatgatccctggtggtacaggatttgatacgcataaacgtattaagcagcacctcgaaaaagagcaagaagacttggtctttgacttcgatagtgagtttgagtctgtagcaggctaa

SEQ ID NO: 89 - DNA, 3759 bp, Chlamydia muridarum
atgttcaagtgcccggagcgggtcagcatcaaaaagaaagaagatattttagatcttcctaatcttgtcgaagttcaaatcaagtcgtataagcagtttcttcaaattgggaagctagctgaagagcgagaaaacattggtttagaagaagtcttcagagaaattttccctatcaaatcatacaatgaagctacgattttagagtacctctcttataacttaggagtgcccaaatactccccagaagagtgtattcgtcggggaattacttatagcgttaccttaaaggttcgtttccgtttgactgatgaaacgggaattaaggaagaagaagtctatatgggaactattcctattatgactgacaagggaacctttattatcaatggagcagaaagggtcgttgtttctcaagttcaccgttctccagggattaactttgagcaggagaaacattctaaagggaatgttttgttctcttttagaattattccttatcgaggaagttggttagaggcttcttttgatattaatgacctcatctatattcacattgataggaaaaaacgtcgtagaaagattttagctatgacgtttattcgagcattggggtattcgacagatgctgatattatcgaagaatttttcgctgtagaagagcactctctgcgttcagaaaaagattttgttgctttagttggtaaagttttagcagacaatgtagtagatgcggattcttcgttagtttacgggaaggctggagagaaactcagtactgctatgctgaagcgcattttggatgctggggtacaatctttaaaaattgccgttggagctgatgaaaatcatccaattatcaagatgttggcaaaagatcctacagattcttacgaagctgctcttaaagatttttaccgcagattgcgtccaggtgagccagcaactttagctaatgctcgttctacgattatgcgtctatttttcgattctaaacgttataatttaggtcgtgttggacgttataaattaaataaaaaattagggttccctctagatgacgaaacactgtctcaagtgactttgagaaaagaagatgttattggagctctaaagtatctaattcgtttgcgaatgggtgatgagaagacgtctatcgatgatatcgaccatttggcaaaccgacgtgtccgttctgttggagaattaattcagaatcattgccgatcaggattggctagaatggaaaaaatcgttcgagaaagaatgaatctcttcgatttttcttccgatacgttaactcctggaaaaattatttctgccaaagggctagttagtgtcttgaaagatttctttagccgttcccagttgtcccaatttatggatcaaacgaatcctgttgcggaattgacacataagcgtcgattatctgcattaggacctggaggattgaatagggaaagagccggttttgaagttcgagacgttcattccagccactatggtagaatttgtccaattgaaactccagaaggaccaaacattggattgatcacttccttgtcctcttttgctaagatcaatgaatttggctttattgagactccttatcgcgttgtgcgtgatggcatcgtaacagatgaaattgagtacatgactgctgatgttgaagaggattgtgtcatcgctcaggcatctgcggagcttgatgaatataacatgtttaaggattctgtatgttgggctcggtataaaggagaagcttttgaagcggatacgagtacggtcacacatatggacgtctctcctaaacaattggtgtctgtagttaccgggcttattcctttcttagagcatgacgatgctaaccgagctcttatgggatcgaacatgcaacggcaggctgtgcctttattgaaaacggaggctgctattgtcggaactggattagaaggacgtgcagctaaggattctggagctattgttgttgctcaagaagatggggttgttgaatatgtcgacagttacgagattgttgtagcgaagaaaaataacccaacgctgaaagatacatatccacttaaaaagttcttaagatctaactctggaacatgcatcaaccagactccgttatgttctgtcggagatgtagtgacacatggggatgttttggctgatggacctgcaacggataaaggagaacttgcacttggtaaaaacgtgctagtagcctttatgccttggtatgggtacaacttcgaagatgcgattatcatctctgaaaaattaatcaaacaggatgcctatacttctatctacatagaagagtttgaactgacagcccgagatactaaacttggtaaagaagaaatcacaagagacattccgaatgtttctgaggaagttttagcaaatttaggagaagacggaattgtccgtattggtgctgaagttaagcctggggatattcttgttggtaaaatcactccaaaatctgaaactgagttagctcctgaagaacgcttattgcgagctatttttggtgaaaaagctgctgatgttaaagatgcttctttaacggttcctcctggtacagaaggggtcgtgatggatgttaaagtcttcagtagaaaagatcgcttgtctaagagtgatgatgaactggttgaagaggctgtgcatcttaaagacttgcaaaaagagtataagagccagcttgctcagttgaagatggaacatagagagaagttgggagctttattgcttaatgagaaagctcctgcggcaatcattcatcgacgctctgcagatattttagtgcaggaaggggctgtttttgatcaagaaactatagagcttttagaaagagagtctttagttgatctcctaatggctccttgtgatatgtacgatgttttgaaagacattctttctaactatgaaacagctgttcagcgtttggaagtaaattacaagacagaggctgaacacataaaagagggtgatgccgatttagaccacggggtaatccgacaagttaaggtctatgtagcctccaaacgaaaattacaagttggggataaaatggctggacgtcacggaaacaaaggggttgtttccaagattgttcctgaagcggatatgcccttcttggcgaatggagagacggtacagatgatcttgaacccattaggggtgccttctcgaatgaaccttggacaggttttggaaacgcatctgggatatgctgcaaaaacagcaggtatctatgttaagactcctgtctttgaagggttccctgaatcgcgtatttgggacatgatgatcgagcaaggcttacctgaagatggtaaatcctacttattcgatggtaagactggagagcgtttcgacagtaaagtggttgttggatacatctatatgttgaaattgagccacctgattgcagataagatccatgctcgttcgataggaccttactctctcgttacccaacagcctctcggaggaaaagctcagatgggaggacaaagattcggggagatggaagtttgggccttggaggcatatggagtagctcatatgttacaagagatcctaaccgtgaaatctgacgatgtttcgggaagaactcgtatctatgagtcaatcgttaaaggagaaaacttacttcgttctggaacgcctgagtcgttcaatgttttgattaaagaaatgcaaggtctagggctcgatgttcgccctatggtagtagatgcttaa

SEQ ID NO: 90 - DNA, 393 bp, Chlamydia muridarum
gtgacaacagaaagtttggaaactttagtagaacagttgagcggcttgacggtgcttgaattgtctcagcttaaaaaaatgttggaagaaaagtgggacgttactgctgctgctcctgtagtagctgtcgctggtgctgctgctgctggtgatgctcctgcttctgcagagcctacagagtttgctgtaattctggaagacgttcctgctgataagaaaatcggggttctgaaagttgttagagaagttactggattagctttgaaagaagctaaagaaatgactgaaggattacctaagacagttaaagaaaaaacttctaaaagtgatgcagaagacactgttaagaagttacaagaagctggtgctaaggctgttgctaaaggactgtaa

SEQ ID NO: 91 - DNA, 2037 bp, Chlamydia muridarum
gtgagacactccatatatcaattagattctgctgttgagaatgtatttaggttggcatggactttaagattctctgagcggaagatgttgttgttatctcgtcaaagtggttcgggcggctcctttcaactatcttgcgctggtcatgagcttgcaggcgttgtggcggcaaagagtttgattccaggcaaggactgggcatttccttactatcgggaccaaggattccctctagggttaggatgtgatctttctgagatttttgcttcttttttagctcgaacgacacaaaatcattctgatggcagaatgatgccctaccattattctcataaaaaacttcgtatatgttgccagtctagtgtagttgggacacagtttttgcaagcagctgggcgtgcctgggcggttaaaaattctgggaaaaatgaagtcgtttatgtatcgggaggggacggatctacttcgcaaggggaattccatgagatgttaaattttgcatctttgcatcagctcccgcttgtgattgttatacaaaataatcaatgggcgatttcagttccttttgctgatcaatgtggagcagatttggtagcgcttgggaagagctattctggccttgcgacatacaaagtagatgggggggatctgtctgcgttgacacaaacttttgattgcgcagtttctgatgcaagacatcaccatattcccgccttagtaatcgtcgatgttgtgcggttggagtctcatagcaattcagataaccagactaaatatcgttctgaagaagaattgctgtactgtcaagaacaagatcctttggttcgtttagaaaaatctctgattgatgattttggagttgctcaagagactattgagcaaattaaggaagagcttcaagaaacgattagcaaggcttgtgagcttgctgagtctacgcctttccattgtaaaggggctaccaaacatgaggtttttgctccctataatgtttccttgatcgactatgaaaattccttagagtccgcttctttacagggatcagagcctcgggttatgcgtgatgcgataaccgaggctttggttgaagagatgcatagagatcccggtgttgttgtttttggtgaagatgttgctgggaataaaggaggggtttttggggttacaagaactctgacggagcgatttggaagaaatcgttgtttcaatacacctttggcggaagctaccattattggaactgcgattggaatggcttttgatggcttccataagcctgttgcagagattcaatttgctgattatatctggccaggtatcaaccagttgttttctgaggcagcgagtatctattatcgctccgcaggagagtgggagatgcctattgtgataagaactccttgcggagggtatattcaaggggggccttatcattctcagaatatagaagcttttcttgcccattgcccaggattaaaggtagcatatccttcaaatgctgctgatgcgaaagctttattgaaagcagctattcgtgatcctaatcctgtagtgtttttggaacacaaggccttgtatcagcgacgggcatttagtacaacgcctgtattttcttctgattatgttcttccttttggtaaagctcgtattgtgcactcaggaacggatttaacgattgtttcttggggaatgtccctagttatgagtgtagaggttgcgaaggatcttttaggattaggggtctctgtcgaggtgattgatttacgaacaatcgttccctgtgattttgctaccgtgtgtgaatctgtgaaaaagacagggaaattgctggttgttcacgaagcttcagagttttgtggctttggtagcgagcttgtggctttggtagcggaaagagcttatagatatctagatgctccgatcaaacgtataggagggcggcattcccctattccttattccaaggtgttagagaatgaagttcttccacagaaagaaatgatctttcaagaagcgaaatcattggcagagttttag

SEQ ID NO: 92 - DNA, 2460 bp, Chlamydia muridarum
gtgaactcgacgaataatacagactctcaaaatctggatccgaatgcttcagaagtcgaaaaacttcttgatgaatccgctgaggcagaagagaagacagatgaccatactcccccctcagaactttttattcttcccctgaataaacgtcctttcttcccaggcatggcagccccactgctaatagaagcaggtcctcattatgaagtgcttactctgcttgctaaatcttcccaaaaacatatcggtctcgttctaactaaaaaagaagatgccaacaccttaaaaattgggtttaatcaacttcatcgagtcggcgtatctgcgcgcattttacgcattatgcctatcgaaggaggcagcgcacaggtattattgagtatagaggaccgtattcggatcgttaaacccgtacaagacaaatatctaaaagccaaggtcgcataccataaagaaaataaagaactgactgaagagctaaaggcttactctattagcatcgtatcgattattaaggaccttttgaagctcaacccactattcaaagaagagcttcagattttcttggggcactccgattttactgaacctggtaagttagcagatttttcagttgctctaactacagcaacacgagaagagcttcaagaagttttagaaacgactgatatgcacgatcgcatagacaaggctcttgttttacttaaaaaagaacttgatctaagtcgactacaaagcagcattaatcaaaaaattgaagcaaccatcacaaaaagtcaaaaagagttcttcttgaaagaacaactaaagactataaaaaaagaattaggtcttgaaaaagacgaccatgctgttgatctcgaaaaatttatggaacgtttaaacaaacgagatgttcctcagtatgcgatggatgttatccaagatgaaatggataaactacagacattggaaacctcttcagcggaatatgctgtctgccgcaactatctcgattggttaaccattgtgccttggggaatccaaaccaaggaataccatgatttgaaaaaagctgaatctatcttaaacaaagaccattatggtttagaagatatcaagcagcgtattcttgagttaatcagtgtaggcaagttagcgaacggaatgaaaggaagcatcatttgcctagttggtcctccaggagtagggaagactagtattggtcgaagcattgcaaaagttcttcaccgtaaattcttccgattttctgtaggaggaatgcgcgatgaagctgagattaaaggccatcgtcgaacctatattggggccatgccaggaaagcttgtgcaagctttgaaacagagtgctatcatgaatccggtcattatgattgatgaggtcgataagatcggttccagctatcatggagaccctgcttctgcgcttcttgaagtattggatcctgagcaaaacaaagatttcttagatcattatttggacgttcgcgttgatctgtccaacgtgcttttcattttgacagcaaacgtattggattccattccagacccgttattggaccgtatggaagtattacgtttatccggatacattctggaagaaaaattgcagatagctaccaaataccttgttccgcgagcaaggaaagaaatgggactttccgcacaaaacgtctccttccagcctgaagctctcaaacatatgatcaataactatgctagggaagcaggcgtgcgtacacttaatgaaaacattaagaaagtattgcgaaaagtggctctaaagattgttcaaaatcaagagaaaaatccttctaagaaatctcggtttacaattacgccaaaaaatctacaggattatctcggcaaacctattttttccagtgatcgtttctacgaaaaaactccagtaggagtcgctacgggcctggcctggacttctttaggaggagccaccctatacatagaaagcgttcaagtcccctcgtcatcaggtaaagctgacatgcatctaactggtcaagctggagacgtcatgaaagagtcgtcacagatagcctggacgtaccttcacagcgctctagaacgttatgctccaggacgaccattctttgaaaaatctcaggtccatattcacattcctgagggagctactccgaaggatggcccttctgcagggatcactatggtaacctcgttactttctttacttttggatgttcccgtcctgaataaccttggcatgaccggggaactcaccctaacgggaagagtattaggcataggcggtatacgagagaaactcattgcagcaagaagatctaaactcaatgttttgattttccctgaagataatcgccgagattatgacgaactccctgcctatcttaaaaaaggcttgaaggtacacttcgttacgcactatgacgatgtgttcaaaatagctttccctggggtctaa

SEQ ID NO: 93 - DNA, 546 bp, Chlamydia muridarum
atgattagagatcttgagtattatgatagcccgattttgcgtaaagttgcggctcctatagatgaaatcacggatgagctacgacaacttgtactagatatgagtgagactatgactttttataaaggagtgggactcgcagctcctcaggtaggacatagtgttgctttattcattatgggcgtagaaaaagagctggacgatggagagctcattttctgtgatttcccaaaagtattcattaatcctgtgattactcaaaaatctgagcagttagtttatggaaatgaagggtgtttgtctattccaggattgagaggagaagtggctaggcccgataaaattacggtaacagcaaaaaatttggatggccaaccattttctatgactctagagggttttttggcgagaatcgtcatgcatgaaaccgatcacctgcatggagtcctctatatcgatagaatgtctgataaagacaagacgaaacagtttaagaataacctagagaaaattcgccgaaaatatagtattttgcgaggcttatag

SEQ ID NO: 94 - DNA, 588 bp, Chlamydia muridarum
atgccttacggaactcgttatccaacattagcttttcatacaggaggcgttggcgaatctgatgacggaatgcctcctcaaccttttgaaactttctgctacgattcggccttacttcaagcaaaaatcgaaaatttcaatattgttccctacacttcagttttacccaaagaattatttggaaacatccttcctgttgatcaatgtacaaaatttttcaagcatggtgccgtgttagaagtcattatggctggtaaaggtgctgctgtcgcggaaggaacacaggcaatagcaacaggagtaggcatctgttgggggaaagataaaaatggagacttgataggcggttgggcagctgaatatgtcgaatttttcccgacctggatcgatgatgaaatcgctgaatctcacgcaaaaatgtggttaaaaaaatctctgcaacatgaacttgacctgcgttctgtaagcaaacacagtgaatttcaatatttccataactatatcaatatcaaaaagaaattcggattttgcttaacagctcttggcttcttaaattttgaaaatgcagatccagttgttatccaataa

SEQ ID NO: 95 - DNA, 780 bp, Chlamydia muridarum
gtgagtatgtatataaaaagaaagaaagcttggatgactttcttagcaattgtctgtagtttctgtttggcgggctgttcaaaagagagcaaagactctgttagtgaaaaatttattgtaggaactaacgcaacgtatcctccttttgagtttgttgatgaaagaggtgagacggttggctttgatattgatttagctagggagattagtaaaaagctagggaaaaaattagaagtccgagaatttgcttttgatgcactcgttctcaatttaaaacagcatcgtattgatgcaattatggcaggggtgtccattacgtcttctcgattgaaagaaattttgatgattccctactatggcgaagaaataaagagtttggttttagtgtttaaggatggagactcaaagtctttaccactagatcagtataattctgttgctgttcaaactggcacgtaccaagaggaatatttacagtctcttccaggggtgcgtattcgctcttttgatagtactttagaagtgcttatggaagttttgcatagcaagtctcctatagctgttttagaaccgtctattgcgcaggtcgttttaaaagattttccgacgctcactactgaaacgatagatcttcctgaagataaatgggttttagggtatggaattggagttgcttctgatcgaccatctctagcttctgatatagaagctgctgtacaagagatcaagaaagaaggagtgttagcagagttagagcaaaaatggggtttgaacggctaa

SEQ ID NO: 96 - DNA, 381 bp, Chlamydia muridarum
ttgcgaagaagcactgaatttggtgttaaaacagcagggggtagtatgactacaatttttgaacgaattatagagggagctgtagagtgtgataaggtttttgaggatgaaaattttatcgtgattaaggataaatttcctcaagcaccagtgcatttgctcattattccaaagaagcatattgaaaaattacaagatatgcaaagcgacgatttttccttgctttcggaagctgggaagattattcagttgatggcccgtgatttcggtatagaaaatggatatcgtgttgttatcaacaatggcttagaaggagggcagagcgtattccatctacatatccatcttcttggtggaggcttgttaggctccatagcataa

SEQ ID NO: 97 - DNA, 1977 bp, Chlamydia muridarum
gtgttcaatatgagcgaaaaaagaaagtctaacaaaatcattggtatcgacctagggacgactaactcttgcgtctctgtaatggaaggtggccaacctaaagttattgcctcctctgaggggactcgcactactccttctatcgttgcttttaaaggtagcgaaactctcgtggggatccctgcaaaacgtcaagcagtaacgaacccagaaaaaacattagcttctactaaacgattcattggcagaaaattctctgaagtcgaatctgaaatcaaaacagttccctataaagtagctcctaactccaaaggagacgctgtttttgaagtagaaaacaagctgtacactccagaagaaattggagctcaaatcctcatgaaaatgaaggaaacagcagaagcttatcttggagagactgtaactgaagctgtcatcactgtacctgcttattttaacgactctcaaagagcctctacaaaagatgctggacgcattgcaggactcgatgttaaacgcattattcctgagccaacagctgctgctcttgcttatggtattgacaaagagggagataaaaaaattgccgtctttgacttgggaggaggaactttcgatatctctatcttagaaattggtgatggagtctttgaagttctctcaacaaatggtgacactcacttgggtggagatgatttcgatgaagtaatcatcaactggatgttaggtgaattcaaaaaacaagaaggcattgatctaagcaaagacaacatggctttgcaaagattaaaagatgctgctgaaaaagcaaaaatcgaattatccggtgtatcttctacagaaatcaatcagccattcatcacaattgatgctaatggtcctaaacacttagctttgactctaactcgtgctcaattcgagcatctagcttcttctctcattgagcgaacaaaacagccttgtgctcaagctttgaaagatgctaagttgtccgcatctgatatcgatgatgttcttcttgttggaggaatgtctagaatgcctgcagtacaagcagttgtaaaagagatttttggtaaggagcctaataaaggcgtcaatccagatgaagtagtggcaattggagcagccattcaaggaggagttcttggtggagaagtgaaagatgttcttctgcttgatgtcattcccctctccttaggaattgaaactctaggaggagtcatgactcccctcgtagagagaaacacaacgatccctacgcagaaaaaacaaattttctctacagcagctgacaaccagccagcagtaactattgttgtgcttcaaggtgagcggcctatggctaaagacaataaggaaattggacgttttgatctaacagacattcctccagctcctcgtggccatcctcaaattgaagtaaccttcgatattgatgctaacggaatcttacatgtatctgctaaggatgctgctagtggacgtgaacagaaaatccgtattgaagcaagctccggattaaaagaagaagaaattcaacaaatgatccgagatgctgaactcaataaggaagaagataagaaacgcagagaagcttcggatatcaaaaatgaagccgatggaatgatctttagagcagaaaaagcgattaaagactaccaagataaaattcctgcagatcttgttaaagaaattgaagagcaaattgagaaagtacgtcaagctgtaaaagaagatgcttcaacaacagctattaaagcagcttctgatgaactaagtgctcgcatgcaaaaaatcggggaagctatgcaggctcaatcagcctctgctgcaaatgctcagggagggccaaatattaactccgaggatctgaaaaaacatagtttcagcacgcgacctcctgcaggagacaactcgtcttctacagataacattgaagacgcagatgttgaaattgttgataaacctgaataa

SEQ ID NO: 98 - DNA, 765 bp, Chlamydia muridarum
atgcatgacgccctccaaagtattttggctatccaagagctcgatattaagatgattcgtttaatgcgagtcaaaaaagaacatcaaaatgagctcgctaaaattcaagctttgaaaacggatatccgttacaaggtagaagagaaagaacaagaaatggagaagctgaaagatcagatcaaagctggagaaaaacgcattcaagaaatttctgatcagatcaacaaattagaaaatcagcaagctgctgtaaagaaaatggatgagtttaatgctctaactcaagaaatgactgcagcaaataaggaacgccgaactttagaacagcaactcagtgatctgatggataagcaagctagcggcgaagatcttctcatctccttgaaagaaagtctatcttctacagaaagtagtagcagtgcaatcgaagaagaaatccgagaaaatattcgaaagattaatgaagagggtcgttctttattaagtcaaagaactcagctaaaagaagccacggatccagagttattcagcgtttatgaacggcttcttaacaataaaaaagaccgcgttgttgtcccgatcgaaaaccgtgtttgcagtggctgtcatatagcacttacccctcaacatgaaaatctagtacgtaaacaagaccatttagtattttgcgaacattgttcaaggatcctttactggcaagaactgcaagctacatcggcagagggatccactacaaaacgtcgtcgtcgtcgtactgcagtgtaa

SEQ ID NO: 99 - DNA, 1278 bp, Chlamydia muridarum
atgatggcttgcaaccaagaacttctttcgcctagaggcttagatttgctcagcaaaaattctcattctaatcttactcctacgatattctatccgtcggaccacaatattgatctgcaaagcttctctcctcatgccctttccgttgtgagaactttaaaaaaagctgggtatgaggcctatatcgttggaggatgtattcgtgatctcctactaaaaacggagcctaaagatttcgatgtctctacttctgccaaacctgaagaagttaaagccttattcaaaaattgtattctcgtaggcaaacgttttcgtttagctcatatccgcttccccaatcaaatcatagaagtctctacctttagatccggtagtaacgaagaagattctttaattacaaaagataatctttggggatccgctgaagaggatgtactgcgaagagactttactattaatggccttttctatgatccgagctccgaagtcatcattgactacacgggaggggtggaagacttaaaaaatcgctatttaagaaccattggcgatccttttctccgattcaaacaagaccctgtgcgcatgctgcgcctattaaaaatcttgtctcgctacgcctttactgtggatccaaaaactcttgaagctcttcgagagtctcgccatgagctaataaaaagctctcaaccaagagtatttgaagagcttataaaagtattaagctccggagaatccactatttttttccagctagcttcagaatatcggatcttagaaattctgttcccttatatgtctaaagcttttggcttaagcaaagttctccaagatcagacttttgctagcttaacggctttggatgctaaagtgcggcagcgttctttctgcttagaaagacatcttctgttgtcgatattgttgttccctatcgtaaacttcaatgttcgatataaatatagtcagcatccaacaatgtctattcaggatatttttgattatattaaaaactttttaacagaattttttgccgactcttttaccagctgctcaaagaaaaactttattttgacaactttacttttacagatgcagtataggctgacccctctagctccattaaaaaaagaaagaaattcgttcttcaataaaaagcttttacgccatacctactttcttgaagctctttacttgttagaaatccgcagtcaggtatttccaaaagtaaaagctccgtatgaggagtggctcaaccagtatgaacgaatttcggagtaa

SEQ ID NO: 100 - DNA, 486 bp, Chlamydia muridarum
ttgcttattttggatcgatcttctcctcaaatttttatttccaatgaacaacaggacgttgatatagatttacaatctgttcagcgtcttgttattttgtttttggaactgcaaaaagtctctacagatcaggtatacatttattttttgagcgatgccgctcttgctcagttacacgatgagcaattttctgatccctctctcacagacactatcactcttccgatagatagacctggcatccaatctttccctcacgtcttaggagaagctttcgttagccctagagcggctatgcgattcttagggcaatacacagaagcccaactataccatgaaatctcccgttatgtagtccattccttgctacacatgctaggatacgatgatcaaacagatgaagataagcgtattatgcgagaacaagaagattcttccctaaccttcttagctcagaaccaagcactgttgcatcctactgtataa

SEQ ID NO: 101 - DNA, 318 bp, Chlamydia muridarum
atgaagcagcaaaaacaaagaattcggattcgcttgaaaggttttgatcaagggcagctcgatcagtctacagcaaacattgttgagactgctaaaagaaccggagctcgtgttgttggtccaattcctttaccaacgaagagagaggtgtatacggttttgcgctcccctcacgtagataaaaaatctcgtgagcagtttgaaattcgtacacataagcgattaattgatattttagatcctacaggaaaaacaatcgatgctttgaagatgttgtctttgcctgctggagtcgatattaaaattaaggctgcttaa

SEQ ID NO: 102 - DNA, 2085 bp, Chlamydia muridarum
atgagcgatcaagagttcggtttagacgcgattagaaatatcggtatcatggcgcatatcgatgcaggaaaaacaacaacgacagagcgaattcttttctacgcgggaagaactcataagattggggaggttcatgagggcggagctaccatggactggatggagcaggagcaagaaaggggaattacgatcacctccgctgctacaaccgtattttggttgggatccaagatcaatattatcgatactcccggtcacgtcgatttcactattgaagtagagcgttctttgcgcgtgcttgatggtgctgttgccgtttttgacgctgtttccggggttgagcctcaatctgaaactgtttggcgacaagcaaacaaatatggcgttcctcgagttgcttttgtaaacaaaatggaccgtatgggcgcaaattattttggcgctgttgagtccatgagagagaaacttggggcaaatgctattccagttcactgtccaattggtgctgaaagccaatttgtgggaatggttgatttgatttctcaaaaggctctttacttcctagatgattctttaggagctaagtgggaagagcgggaaatcccagaagatcttcaagagcagtgcgaagtcctaagaatgcagttgcttgaagagttagcaactgttgacgaaactaacgaagcctttatggagaaagtccttgaggctcctgagagtattacagaagaagaaattcacagagtaatgcgtaagggagttattgaaggcaaaattaatccagtcctatgtggaagtgctttcaaaaacaaaggggttcaacagcttcttgatgtgatcgtcaagtggttgccttctcctcttgatcgtggtaacgttcgtggaatgaatttaaagacaggtgaagaagtttgcttgaagccttcgaaagatgggcctttagctgcgcttgctttcaaaattatgacagacccttatgttggtcgtattactttcatccgtatttattcaggaacattgaaaaaaggttctgctattcttaattctactaaggataagaaggaacgtatttcaagactgttagaaatgcatgctaatgagcgtactgacagagatgaatttactgttggggatatcggggcatgtgtaggtcttaagttttctgtaacgggggatactctctgtgatgaaaaccaagagattgtattagagcgtattgaagctcctgagcctgtaattgatatggcaattgagcctaaatctaagggagaccgagagaaattagctcaggctttaagtgctctttctgaagaggatccaactttccgagtttctacaaacgaagaaactggtcagacaattatttctggaatgggagagttacatcttgatattctccgcgatcgtatgatccgagagtttaaagttgaggctaacgttggtaaacctcaggtttcctacaaagaaacgattacgaaagcaagtgatagtgaaacaaagtatgtgaagcagtctggtggtcgaggacagtatgctcacgtttgcttggaaatcgagccaaatgagcctggtaaaggtaatgaggtagtcagcaagatcgttgggggagtaattcctaaagagtacattcctgcggtaattaaaggagttgaagagggattaaattccggagttttagctgggtatggtttggtcgatgttaaggtaagcattgtattcggatcttaccatgaagttgactcgagtgaaatggcctttaagatttgtgggtcaatggctgtgaaagaagcttgtagaaaggcccttcctgtcattttagagcctattatgaaagtgacagttataactccagaagaccacttgggagatgtaattggagatttaaaccgtcgtagaggtaagattctaggccaagaagcttctagaaatatggcccaggtcaatgcagaggtacctttgagtgaaatgttcggttacatgacctcattgagatcattgacttcaggtcgagctacgtcgactatggaacctgcattctttgctaaagttcctcagaaaattcaagaagagattgttaagaagtaa

SEQ ID NO: 103 - DNA, 1950 bp, Chlamydia muridarum
atgaagagactcgctcgtttttgtcttctagccttaactttattcccacaacttgcgttttcctcagcccccctccgacaacaagatgtccgcaaaaccgtagaaaaattagtcgagcaccatattgatacaaaacatatttctccccacattttatcgagatctttggaagactatgctcgatcattcgattctcataaagcatacttaacccaagatgaggtcctaacatacgtcttttcagaaaaagcgacccattccttatttaaacaataccaagaagataatttcgcttcttttagagagttacatacttgtattcaacagagcatttcccgggtaagagagtggcgtactgtgtggttatcagatgctgttcgcgtcattcaagatgcttcctcacatactatcccaaaaaaaccaactacctggggatcttctattgaagaggtaaagcaaagacaatatgagcttcttctttcctatgcatctatctacctagaagatgctacaaaaaatcgctatcaggggaaagaacatgcactagtgagattatgtattcgccagattgaaaatcacgaaaatccttatataggaatcaatgaccatggactcaaaatgtctcttgaagaagaggccaatagcttccatattcgcatcattaaatccattgctcatagtttagatgctcatacagcctacttcagcaaagaagaagccctttctatgcgagctcagctggagaaaggtatgtgtggaataggggtagttctgaaagaagacattgatggtgtagttgttaaagaagttcttcctggagggcctgctgataaaacaggaagtcttcgtgtgggcgatattatttaccgcgttaatgggaaaaatattgaaaacaccccttttcctggagttttagattccctaagaggattaccaggatcttccgtcactttagatattcacagacaaaacaacgaccatgtcgttcaactacgccgagaaaaaattctcttagatagccgccgtgttgatgtatcctatgaaccttacggtgacggcattatcgggaaaatcaccctacactccttttatgaaggagaaaatcagatatctagtgaacaggatttacgacgagctattcgagaactgcaagaaaaaaaccttcttgggttagttcttgatattcgagaaaacaccggaggatttttatctcaagccatcaaagtttctggtttgttcctaaccaatggagttgttgttgtctctcgatatgcggatggatctgtaaaacgctatcgcacgatttctcctcaaaaattttatgatgggccattagctgttttggtttctaaaagctctgcttccgcagcagaaattgttgcacaaacacttcaagactatggtgtagcccttattgtcggagataaacaaacctatgggaaaggaaccatacaacaccaaacgattacagggaacaactctcaagaagatttctttaaagtaactgtagggagatactattctccttcagggaaatccacacaactggaaggtgttaaatcagatattgttatcccctcccgatatgcggaagacaatctaggtgaacgttttttagaatatgctctcccagccgatcaatatgagaatgttttgaacgacaatttaggagatctcgatatccatattcgtccctggttccaaaaatactattctccacatttacaaaaaaccgagcttacgtggagagaaatgcttccccaactcgtcgagaacagtcagcagcgtcttgaaaaaaacaaaaattttgaaatttttgttcaacatttgaaaaaaacagataaacaagaacaatcatttggaagcaatgacctgcaaatggaagagactgtcaatattgttaaagacatgattcttttgcaaacttcattaagatctcccgcacaataa

SEQ ID NO: 104 - DNA, 459 bp, Chlamydia muridarum
atgagcactacacccattgttagtggagtcacgagtcaaaacaattcatcggaaaatgtttctaataacgctagatccttaactctaaaagagcgtgcatcgaagatcctatcttctaccgcatttaaggtaggattagcagtagtggggatatttttggttattcttagtattgttttgctattcatattgcctgcaactgctgcgagcaatccaatttatctggctattccagctattttaggatgcgtgaacatctgtattgggattttatctatgaataagggatcttgttcagaagcgaagtggaagttgtgtaaaaacgtattaaaaacttctgaagatattttggatgatggggagcttaataattcaaataaaatatttactgatgacaatttaagtagggtggaggatattgttataaccctatctagtagaagaaatagtgtggcataa

SEQ ID NO: 105 - DNA, 1665 bp, Chlamydia muridarum
atgcgaataggagatcctatgaacaaactcatcagacgagctgtgacgatcttcgcggtgactagtgtggcgagtttatttgctagcggggtgttagagacctctatggcagagtctctctctaccaacgttattagcttagctgacaccaaagcgaaagagaccacttctcatcaaaaagacagaaaagcaagaaaaaatcatcaaaataggacttccgtagtccgtaaagaggttactgcagttcgtgatactaaagctgtagagcctagacaggattcttgctttggcaaaatgtatacagtcaaagttaatgatgatcgtaatgtagaaatcgtgcagtccgttcctgaatatgctacggtaggatctccatatcctattgagattactgctatagggaaaagagactgtgttgatgtaatcattacacagcaattaccatgcgaagcagagtttgttagcagtgatccagctactactcctactgctgatggtaagctagtttggaaaattgatcggttaggacagggcgaaaagagtaaaattactgtatgggtaaaacctcttaaagaaggttgctgctttacagctgcaacggtttgtgcttgtccagagatccgttcggttacgaaatgtggccagcctgctatctgtgttaaacaggaaggtccagaaagcgcatgtttgcgttgcccagtaacttatagaattaatgtagtcaaccaaggaacagcaacagcacgtaatgttgttgtggaaaatcctgttccagatggctatgctcatgcatccggacagcgtgtattgacatatactcttggggatatgcaacctggagaacagagaacaatcaccgtggagttttgtccgcttaaacgtggtcgagtcacaaatattgctacagtttcttactgtggtggacacaaaaatactgctagcgtaacaacagtgatcaatgagccttgcgtgcaagttaacatcgagggagcagattggtcttatgtttgtaagcctgtagaatatgttatctctgtttctaaccctggtgacttagttttacgagacgttgtaattgaagatacgctttctcctggaataactgttgttgaagcagctggagctcagatttcttgtaataaattggtttggactttgaaggaactcaatcctggagagtctttacaatataaggttctagtaagagctcaaactccagggcaattcacaaacaacgttgttgtgaaaagttgctctgattgcggtatttgtacttcttgcgcagaagcaacaacttactggaaaggagttgctgctactcatatgtgcgtagtagatacttgtgatcctatttgcgtaggagagaacactgtttatcgtatctgtgtgacaaacagaggttctgctgaagatacaaatgtgtccttaattttgaaattctctaaagaattacaacctatatctttctctggaccaactaaaggaaccattacaggaaacacggtagtgtttgattcgttacctagattaggttctaaagaaactgtagagttttctgtaacgttgaaagcagtatccgctggagatgctcgtggggaagctattctttcttccgatacattgacagttcctgtatctgatacggagaatacacatatctattaa

SEQ ID NO: 106 - DNA, 651 bp, Chlamydia muridarum
atgatttttactattgcaaagagccttgttcgcttactgtttcctctgttttacagaagaaaaatctttagatccaaagctagtgcttctgtgacaggggctgctattattgctgcgaatcatgtttcgtttcttgatcccataataatacctctctccttccctggtaaaatttatcatttggctaagtctggtttgtttgctaattctttcgcgcattggctttttcacgagttaggatgctaccccattagcaggaatgctggaaattctgcagccttcaaggctgcgcttaatatcttttctcgcggagaaaagctcattatttacccagagggaacccgtcattctgatggagaaattcaccaagggaaagtaggtgtgggaatgctagctcttaaaggaaatgtccctgtcattcctgtttatgttgctggaaccctcgaagcttttggaaaacaccaaaaattccctaagctctggaaaactttgactaccgtgatagggactcctatttcattccaagatctcattgacaaccctgctattgataaaaaagaagcttatcaattagcgaccgaacgcatcatggccaagattgcaaaacttcgtacttggttccagcaaggatgcatcggagaaattccttag

SEQ ID NO: 107 - DNA, 705 bp, Chlamydia muridarum
atgcaaatcatcctcccaggaatcgttctaacccactctccagcagaaaaacaacatgtcatagcaaaaatcttctctcctgcagggcttctctctgccttcgcaaaaaatggagcctctctatcctgtgattttcgagaatctctgctccctatttcgttcagcctttttaccattcaacatactcctcccaaaatgcgaaaagtactacaaggagaactgaaaaatccgttcacaacgattaaaaattcttatcgactattgcaaagcaccggaaaaatgattcaagccattctcaaaacacaatggcaagaaaaaccttccccccaactcttttctctttttttaaacttccttcaacgaatccctgaaactcctcatccttattttttttcttctatgttcctgcttaagcttttacaacatgaaggaagtttagatttatcccactcctgcactctgtgtaaaagctctttagaatcctcaactgtttatcgtcatgaaggatctctattttgtgaaaaacatgcacacgaaaaaactatcttatttagccaagaagaagagcaaattttaagaattattgtacaagcgaagaagtttcaagagcttatgtgtttagcagagttccctatcgatatcgactccaaaatcgactctctattttcctctttcctcacagaaaaaatgaacgttcttccctaa

SEQ ID NO: 108 - DNA, 792 bp, Chlamydia muridarum
ttgaatatgattcggagatctaggcggatctccgaggttagagtgaaatttaagtatttgcgtccattcagttttttggtcttggttgtcgtagcattttgctatgggtgttcaagggaaaaacaggagattcttgtagggagggatcccacctggttccctcaacaatttggtatatacacatcaggaattaatgcctttgttaacgatttagtgtcagagattaattataaagaggggctaaacatctctttagttaatcaagattgggtgcatctttttgaaaatttagatgataagaagactagaggggcatttacttctgttttcccttcagttgagatgttagcgcggtaccagttttctgatcctattttgttaaccggtcccgtacttgttgttgcagaaaattctccttatcaatctcttcaagatttggaagggaagttgattggggtgtataaatttgattcctctgctcttattgtacaaaatattcctggtgctgtgattaattcttatcagcatatacccatagctttagaagccttatctactcaacgttatgatgctttattagtgcctgtgattgaagccacagctttagtggagactgcttataaaggccgtttgcgcattgcttcagaacctcttaatgaggaaggacttcgtttagttatattgcggggaggaggagcggattccttattagagggatttaatgcggggttggcaaaaacccgtcgatccggaagatataaagcaattaaaatgcagtcacgtcttccctaa

SEQ ID NO: 109 - DNA, 1185 bp, Chlamydia muridarum
gtgtcgaccaagaaaacgacgaagagtgtagttatagctaaggagtttgggatgtcggataattcacataatttactttataacaaatttgagttgcctgaatcggtgaaaatgtctcccgttgaaggtgcagctggtggcattgataaagtagctcggtttgttgctgatcccttagagaagggaatggggcacacattgggaagcgccttgagacgtgctttattaatcggcctggaagctcctgctattgtctctttttctatgacaggagttttgcatgaatacatggcggtagaggggatcatcgaggatgttaccaatatcgttttgaatttgaaaggctctttgctcaaaaagtatcctttacaagattgtgaaggaggaagagcttcccaaaaattgcgagctacaatttctatcgatgcatccgatttagctgctgctggtgggcaaaaagcaattactttaggggatttgctgcaagaaggcacctttgaagctgtaaatcctgagcatgtaatttttacagttactcgtcctatgcaactagatgttatgttgcgggttgctttcggtagaggatatactccttccgagagaattgttctcgaagaaagagagatgaatgagatcgttttagatgccgccttctctcctgttgttttggtcaattatttcgttgaagatactcgtgttggccaggatacggatttcgatcgtttaatattgcaagtggaaacggatggtcgtgtagctcctaaagaggctgtagcttttgctacgcaaattttgagcaaacatttttctgttttcgaaaaaatggacgagaaacggatcgtttttgaagaagccatttctgtagaaaaagaaaataaagacgatattcttcacaagttagttttgggcattaatgagatagaactctctgtacgatccacaaactgtttgtctaatgccaatatcgaaacgataggagagctggtaattatgccagagcctcgcctgttacaatttagaaacttcggtaagaaatctctttgtgagattaagaataaactgaaagaaatgaaattagaattgggcatggatcttagccaatttggcgttgggctggataatgtcaaagaaaaaatgaagtggtatgccgagaaaattcggtcgagtaagaataccaagggataa

SEQ ID NO: 110 - DNA, 369 bp, Chlamydia muridarum
atgccacgcatcattggaatagatattcctgcgaaaaagaaattaaaaataagtcttacatatatttatggaatagggccagctctttctgaagagatcattgctagattgcagttgaatcccgaagcgagagctgcagagttgactgaagaagaagtcggtcgactgaacgctcttttacagtcggattatgttgttgagggagatttgcgccgtcgtgtgcagtccgatatcaaacgtctaattaccatccatgcttatcgtggacaaagacatagactttctttgcctgttcgtggtcagagaacaaaaacaaattctcgcactcgtaaaggtaaacgtaaaactgttgcaggtaagaagaaataa

SEQ ID NO: 111 - DNA, 402 bp, Chlamydia muridarum
atgggaattacgagtgattcaattgcaaatttattgacacggattcgaaatgctttgatggcagagcatttatacattgatatcgagcatagtaaaatgcttgaagccattgtaagaatcctcaagcaacacgggttcgttgctcactttttagtaaaagaagaaaatcgcaaaagactaatgagagtctttttgagatatggggaagatcgcagaccagtgattcatgctttgaagcgtgtatctaagccttctagaagggtatatgtttctgcagcaaaaattccttatgttttcggaaatatgggtattgccgtcctttcaactcctcaaggggttttagaaggttctgaagctagagctaagaacgttggcggtgaattgctttgtttagtttggtag

SEQ ID NO: 112 - DNA, 336 bp, Chlamydia muridarum
atgaagagacgtagtgtttgtgtcggtgacactgtttatgtgcttgctggaaacgacaaaggtaagcaaggaaaagttttacgttgtttgaaggataaggttgtcgttgaaggaatcaatgtccgagtaaaaaatattaaacgctctcaagaaaatcctaaagggaagcgtattaatattgaggctcctctccatatttccaacgtacgtttaagtatcgataatcagcctgctagactgtttgtcaaagttacggagaaaggacgggagctttggaataagcattctgatggcagttcttcattataccgattggtaagagagagaaagggttaa

SEQ ID NO: 113 - DNA, 417 bp, Chlamydia muridarum
atgttaatgcctaaacgaacaaaatttcgcaagcagcagaaaggtcagtttgctggattgagtaagggggcaacgtttgttgacttcggcgagtttggaatgcagactttggaaagaggatggattactagccgtcaaattgaggcatgcagggttgctatcaacagatatttaaaacgtaaagggaaagtttggattcgagttttccctgataaaagtgtaacgaaaaaacctgccgaaactcgaatgggtaaaggtaagggagctcctgatcactgggtagctgttgtccgtcccggacgtattttattcgaagtggcaaacgtttcgaaagaagatgctcaggacgctttaagaagagctgctgcaaagttaggaatcagaacacgattcgttaaacgtgtggaaagggtatag

SEQ ID NO: 114 - DNA, 882 bp, Chlamydia muridarum
atggcttctgtatgtgggcgattaagtgctggggtggggaacagatttaacgcatttttcacgcgtcccggtaacaagctatcacggtttgtaaatagcgcaaaaggattagacagatcaataaaggttgggaagtctgctgctgaattaacggcgagtattttagagcaaactgggggggcagggactgatgcacatgttacggcggccaaggtgtctaaagcacttggggacgcgcgaacagtaatggctctagggaatgtcttcaatggatctgtgccagcaaccattcaaagtgcgcgaagctgtctcgcccatttacgagcggccggcaaagaagaagaaacatgctccaaggtgaaagatctctgtgtttctcatagacgaagagctgcggctgaggcttgtaatgttattggaggagcaacttatattacaactttcggagcgattcgtccgacattactcgttaacaagcttcttgccaaaccattcctttcttcccaagccaaagaagggttgggagcttctgttggttatatcatggcagcgaaccatgcggcatctgtgcttgggtctgctttaagtattagcgcagaaagagcagactgtgaagagcggtgtgatcgcattcgatgtagtgaggatggtgaaatttgcgaaggcaataaattaacagctatttcggaagagaaggctagatcatggactctcattaagtacagattccttactatgatagaaaaactatttgagatggtggcggatatcttcaagttaattcctttgccaatttcgcatggaattcgtgctattgttgctgcgggatgtacgttgacttctgcagttattggcttaggtactttttggtctagagcataa

SEQ ID NO: 115 - DNA, 480 bp, Chlamydia muridarum
gtgaggaagaatattaaagataaaaagaaaacagtttctgccagttgtataaacgatcacatctataaaatatttcctaacgacttgaatacaaataatactatctttggcggattactcatgagtttattggatcggttagctttagtggttgccgaacgtcattgtgaaagtatttgtgtaacagctcttgtagatgctgtgcgtttttatgctcccgcttacatgggagaaaatctcatttgctgtgcttctgtgaatcgctcttggcgaacttctttagaagttggagtaaaagtttgggcggaaaatatttataaacaggaacagcgacatatcacttctgcgtattttacatttgttgcggtagacgaaaataattctcctgtggaaattccagagctagtccctgaaacccaagaagaaattcggcgtttccatgaagctgaccagagaagagcttcccgattgaaactgtga

SEQ ID NO: 116 - DNA, 498 bp, Chlamydia muridarum
atgacgctatcaagaaattctcataaggaagatcagctggaagagaaggttctcgtcgtcaaccgttgttgtaaggttgttaaaggaggccgtaagtttagtttttctgcgcttattttagttggcgatagaaaagggcgtttgggctttggattcgcgaaagctaacgagctaacggatgctattcgtaaaggcggggatgctgctagaaaaaatcttgtctctatcaattctcttgagggaggatctattcctcatgaggttcttgtcaatcacgatggagcagagcttttgttaaaacctgctaagccaggaaccggaatcgttgcgggatctcgcattcgtttaattttagagatggccggagtcaaggacatcgtggcaaagagtttgggatctaataatcctatgaatcaggtgaaagctgcttttaaagctctcctgacactctcttgtaaagatgatattatgaaaaggagagccgttatcaatgattaa

SEQ ID NO: 117 - DNA, 786 bp, Chlamydia muridarum
atggttttaaaaaaagcgcgtctgagaaatcgggtgcaactaaggaagaaacgaatgaaaaatatattaagttggatgcttatgtttgcagtcgccctgcctattttagggtgcgataataacggtggttcgcaaacatctgcgatggggaaagacatggtagaagattctgtactcacagacaatcaaaaattatcaagaaccttcggacatttgttagctcgacaattgagttccacagaagattttacattagatcttactgaggttattaaaggcatgcagtctgaaatagaaggaaaaagtgctcctttgacggattctgaatacgaaacgcaaatggctttagtgcagaaggcaagttttgagaaaaaatgttcagagaatttagcttctgcagaaaaattcttgaaagagaataaagataaagaaggtgtaattgagctagagcctaataagttacagtaccgtatcgtaaaagaaggaacgggacgagttcttacgggtaaacctaacgctttattgcactacacaggaagtttcatcaatgggaaagtttttgacacttctgagaaaaataaggaccctattttactgcctttgacaaaagtcatttctggattctctcaaggaatgcaaggaatgcgagaaggagaagttcgggttctgtatatacatcctgatttagcttatggaacatcaggacaattgcctccaaattccttactcatttttgaagtgaagttaattgaggcaaatgacgataatgtatccgttgcggagtaa

SEQ ID NO: 118 - DNA, 1398 bp, Chlamydia muridarum
atgaatgaagctttcgactgtgtagtgattggagcagggcctggaggctatgttgccgccattactgccgcccaagcaggattaaaaactgcgctaatcgaagagcgggaagctggaggaacctgtttaaaccggggatgcattccttctaaagctctacttgcatcggcagaaattgttgcccaaatacgccatgctgaccaatttggcattcatattaatggtttcagcattgactatcccgctatggtacaaagaaaggatactgttgttcgcagtattcgtgatgggcttaatggcttgattcgtagcaacaaaatcactgtgttttctggaagaggttccttaatttcttcaacagaagtaaaaattttgggggaaactccttctgtaatcaaagcacaatccattatcctggctacaggatctgaacctagagcctttcctggggtccctttttcccaacaatctcctagaatcttatgctcgacaggagttcttaacctaaaagaaatccctcaaaaaatggctattatcggaggtggggtcattggatgtgaattcgcttccttattccataccctaggatcagaagtttccgtcatcgaagcaagccaacaaattctagccctgaataatccagatatttcgaaaaccatgttcgataagttcacgcgtcatggcattcgctttatgttaggagcgtctgtgtcgagcattgaggatatgggtgatcgcgttcgactaactattaacggaaatattgaagaatacgattacgttctcgtatccataggacgtcgattgaatacagaaaatattggattagataaagccggtgtgatttgtgacgaacgcggagtcatccctacagattccactatgcgcactaacgttcctaatatttatgctattggagatatcacagggaaatggcaacttgcccatgtggcctcccaccagggaattgttgctgctcgaaatatagctggacataaggatgaaatcgattattctgcagtcccttccgtaatttttactttcccggaagttgcatccgtgggactttctccgacatcagctcaacaacaaggaattcctgtcaaagtaacgaaattcccattccgagccattgggaaagccgttgctatgggcgaatccgacggatttgctgccattatcagccatgaaacttctcagcaaattctaggtgcttacgttattggccctcacgcctcttctcttatttccgaaatcaccttagctattcgcaatgagctgaccctcccctgcatttatgaaaccatccatgcacatccaaccttagcagaagtttgggcagaaagtgcactattggccgttgataccccgttacatatgccccctactagaaaatga

SEQ ID NO: 119 - DNA, 987 bp, Chlamydia muridarum
atgtttcgttatactctttctcgatccttattttttatttttgctcttttttgttgttcggcatgtgacagtcgctccatgattgctcatggactcactggacgtgaggccaacgagattgtggttctcctagtaagtaaaggagtatccgcacaaaaagttcctcaagtagctggttcgtcaggagggggatcttcagagcaactttgggatatctcggttcctgcagcacaaatcacagaagctcttgctatcctaaatcaggcagggctccctcgaatgaaaggaactagcctcctcgatctttttgcgaaacaagggcttgtgccttctgaaatgcaagaaaaaatccgttaccaagaaggtctttctgaacaaatggctacaaccattagaaagatggatggtatcgttgatgctagtgtacagatttccttctctccagaagaagatcaacttccactaacagcctctgtttatattaaacacagaggtgttttagataatcctaacagcattatggtttcaaaaatcaaacgcttggtagcgagtgctgttcctggcctttgtcctgaaaatgtttctgtagtaagcgaccgcgcttcttacagtgacattactattaacggaccttggggcctctccgatgagatcgattatgtctccgtttggggcattatccttgctaagaattctctcactaaattccgacttgttttctatttcctgattcttctgctctttgttctttcttgcggccttctttgggttatttggaaaactcactcattaattggtgctttgggaggaacaaaagggttctttgatcctgctccatactcacagcttgctttcacacaaaataaggcagctgctgctaaggagacttcagaagcaacagaaagcacaggaggggctcagccagcatcagaagaatcccctaaagagaatgtagaaaaacaagaagagaataacgaggacgcttaa

SEQ ID NO: 120 - DNA, 708 bp, Chlamydia muridarum
ttggctttgccaaaggatccccacctcgtcaaaaggatgaaatttttcagtttaatatttaaagaccaagaggtcgtcccgaataaaaaagttctctctccagacgcctatactaccgtgttaaatgcccaagaacttctagaaaaaacacaagaagattgcgatgcttacacacagcatacgcatgaagaatgtgcaaatctccgagcagaagcaaaaaatcagggatttcaagaagggagtgaggcttggagcaaacagctcgcctttctcattacagaaacacaggctatgcgagaccaaatcaaatcctctctcgtgcctttagctattgcaagtgtgaagaaaattatcggtaaggaattagaaacaaaacctgagaccgtagtatctatcatttcagagtctttaaaagagctcacacaaaacaagcggatcgtgattcatataaatccccaggatcttgccattgtcgagcaacatcgcccagagttaaaaaaactcgtagaatatgctgatgtgcttttactctctcctaaagctagtgtgtcccccggaggatgcattattgagactgagactggcatcgtgaatgctcagcttgatgtgcaactagccgccttagaacaagctttctccgctgccttgaaacaaaaacaacctacagaaaccttttcaaccgatcagactcaaagcaaagaaggctag

SEQ ID NO: 121 - DNA, 444 bp, Chlamydia muridarum
atggcggacgagatacaaaaagagggctcctcacaagaaccatcgtcctctaagtttggttcattcaaacaaaaagtacgtgatttgcacgctagtcccaaagttggggggatgaagagatttttatctcatcatgcttgcgaggcaattagtggggctttaattgtttttgggattatagctaactgtgtatcttgggttgggggattattcgttgcttctggggtagtccttggtttttactccgagattctatctgtactgcaaaaccttcaaagctattatgctaagaatgggcctatcaaaaatgctttagtctgtggggtttctctttactggctaataaaggctccttcttttgtgctttcgtttatcgtgctttgtatcattgtagtgctgcttgctcaagggcaacgcaaagatacaactcatcacgatggataa

SEQ ID NO: 122 - DNA, 993 bp, Chlamydia muridarum
atgcattttctgttcacattactatgcttaacttcattactgactgtagtatcatttgatgccgctggggcacgtaagagagtcgcctattctaagctgttggaaagggaagaagttgtattttctgctcagcagtctgctatttccgaagtagtttatagggacaaacataaacgattatcccctcagatgaaaaaggaagagatttgtttgcaagaaaaggaacgggatagtgtaaccgttcgacagaagcgttatcgtttattagaggtgcctttttctcgtcctcctaataattccagattcaatttatattctttgcttaaagaatcacctgaagattatggggatacttattcggcatattccattttttcgcgattgctacatacgttatatgttcagaccgggatcattcctcaaggggcagaggatcgagtgattcgggcgttgcttgatcagaaggatataattattactcgtgcccgggaacagggggccgatagtatagaaaccttagtgctcccttctgaagaagcagggtggttgtatgcgatgttaaaggggactaaaacttctcggtctttactgcactttttgcattatgaggagaagaacacgaataagggtagattaaatctactatttgcagatccggttattcttcaggcgtttgtgagcgatcccagagcttatgcagaattagagcatgtgcgtcaagaagtgtgggcaagcgctcgacaacaggaacttgccgttaagacttacggtcaagccgctgcgttagaattttttaaaacaaggacagattttcgtacggaattacaggataagacgcaggtgattctccatcgatatgacttgctggttttgcttaataaaaaggtttttgattacacgttgggaactgcgggggattatatttttgtcctagatccagaaaatgggggagggggcagaagtcgttgcgtttcaagaagaaaaactaattaa

SEQ ID NO: 123 - DNA, 525 bp, Chlamydia muridarum
atgtttagaaagataaaagggaaacgttcgtttctactttcggaatttttagtagcttgcgtgctcattagcctactgctcggctctttagggtattggactcgtcggatatgggtatctcataaagagaaagcacatatctatagaacgtttctgcatgacggaaaaatgtatcggctgctcagagatatttttctatcaactacctctatagaagaagggcaagagctggtcttttcttttgatcgaggagtgtatgttgatccagatttagcaggtcttgttcaagggaaactcctttacgatcccaatgatcaagagctttctttagtgatatctagcgaaagaatggaggggcgtcaggaaacgtttccattgtggaaacaagtgctttctgtagaatggagagttcttcggcagcaggaattaggtaggagaacagatagggtgtatttgacgttggtaaggaaatcaggggctttaccaccaagaactctttcttatgtttttgcagtaggtgggtag

SEQ ID NO: 124 - DNA, 1476 bp, Chlamydia muridarum
atgtctctttcatcttcttcgtcttctgacagcaacaatctaagaagtgtcttatctcaagtcattacatcgactcctcaaggcgttcctaatgcagataagctgacagacaatcaggttaaacaggtccaacagactagacagaaccgagacgacctgaacatggaaagcgattcagctattgctggagcggctgggaaggatcgtgcatcctctgtttcccaaatggaaggccaagaggtcatagaacagcaaggattagccgctgggaaggaaacggcctctgcaagcacagcatcgctaactcagaacgcttccacaggagcagcttctcaaaaacgtgtagaagataccaacaaatctttagaactatcctctttaagttccctctcctccgtagatgcgtcccaactacaagaaattcagaacattgttgcttctgcaacgagatctactaacgagacttccctaaagaacttagatactccgggactacccaagcctacaacgacgcctcgccaagatgttatggaaatcagcttagctttagcgaaggcaattacagcccttggagagtctacgcaagcagctttggaaaatttccaaagcacgcaaactcaagcctccaatatgaacaaaatgtctctggaatctcaaggactcaaaatcgacaaagaacgagaagagttccaaaaattgcaagagatccagaaaaaagctggcaacaactccacgatggataccgttaacaaagtgatgattggagtgactgtcgctatcactgtagtttctgttgtagcagcactattcacttgcggtcttggtttaatcggaacagcagcagcaggagctacagcagcagcagcgggagccacagcaggggctacagcagcagcaacgacagcaacttctgtggcaacaacagttgcgacccaagttacgatgcaagcagtcatgcaagcggttaagcaagctatcattcaaggggtcaagcaggctattgtccaagcgattaagcaaggacttaaaaaagggatcatgcaagcgattaaacaggctataaaagctgctgttaaaactcttaccaaaaatattggtaaaattttcaacacagggaaaaatgccgttagtaaatccttccctaacctatccaaagtgatgaacactctgggaagtaaatgggtaacattaggagttggagcactgacagcagttccccaactcgtatcagggattggaaatctgcagctatctgacatgcaaaaagatcttgctaagattcaaaaagaggtcggagctcttacagcccaatctgaaatgatgaaggcgttcaccttgttctggcaacaagcaagtaagattgctgcaaaacaaaccgaaagccctagcgaaacacaacagcaagcggccaaaacaggagctcaaatagcaaaagctttgtccgcaataagtggcgctctagccgccgcggcttaa

SEQ ID NO: 125 - DNA, 768 bp, Chlamydia muridarum
atgaaaacaatcgctgttaacagttttaaaggcggcacagcaaaaacctctacaacccttcatttgggagctgctctagcccaatatcataaagctcgcgtccttctcattgatttcgatgctcaagcgaatcttacagcaggattgggtctggatcctgattgttatgatagccttgctgttgtcctgcaaggagaaaaacaaataagtgaggtcattcgttctattgactcttcagggctggatctcatccctgccgacacttggctggaacgtgttgaagtctcaggatctctagcagctgatcgctattcacacgagcgattaaaaacgattctttccacaatagaacaccaatatgactacgtcattattgatacccctccctccctatgttggctcaccgagtctgctctaatcgccgctcaacatgcgcttatctgcgccacaccagaattttatagcgtcaaaggtctagaaagattggcaaccttcatccaagggatttcatcacgacatcctcttaatatcttaggtgtcacgctatctttttggaattacagagggaaaaataatgctgctttcacagaactgatccaaaaaacgttccctgggaagcttcttaatacacgtatacgcagggatatcaccatctcagaagccgctattcatgggaaacctgtcttctcaacagctccttcagctcgagcctcggaagactatctaaaattaactgaagaactgctatttttgttaagggacatctaa

SEQ ID NO: 126 - DNA, 1878 bp, Chlamydia muridarum
atgaataagccttgtcgagtcattattattgggggaggacttgctggactctctgctgctatgcaacttgctgatagaggaatgttagtagagcttttctctttgacaaaagtaaaacgatctcattctgtatgtgcgcagggaggcatcaatgcagctttaaatttaaaggacgagaacgattctccttatattcatgcttacgacacgataaaaggtggagattttttagcggatcagcctccagttttggaaatgtgcttaactgctcctcgtattattcacatgttggataggtttggttgtccatttaaccgagatgctcaagggaatttggatgtacggcgtttcggaggaaccttgtattatcgcactgtattttgtggcgcctctacaggacagcaattgatgtacactatggatgaacaagtgcgtcgtcgtgaatgtcaagggaagattatcaaaagagagaatcacgagttcgttcgattaattaccaacgaagaagggcgagcttgtggtgttgttgtcatgaatttatttaacaaccgtttagaggttgtacaaggtgatgcagtcattattgcaacgggtggactaggagtgatttttaaaatgtccactaactcgactatttgcacaggagcagcaaatggacgattgtttatgcaaggcatgcattatgccaatccagaattcattcaaattcatcctacagccatacctggaatcgataagctccgcttaatttctgagtctgttcgaggagaaggaggaagggtttgggtgccggggtgttcatccaagaccattattttccccgatggttctcgacgtccttgtggggaaacaggtaaaccctggtactttttagaagaaatgtatcctgcctatggaaatttagtgagtcgagatgtaggagctcgggctattttgcaggtttgcgaggctgggatggggattgatgggcgttatgaagtatttttagacgttacccatttgcctatagaaactttgaacaagctagaggttgttttagatatctattataagttcacaggagaggatcctaaaaaggttcctatgagaattttccccgcggtgcactactctatgggaggtgcttgggtggattggccagcgagtgatgatgaggatcggaatagtcgttatcgacatatgacaaatatcccaggttgttttaactgtggagagtccgattttcaatatcatggagcaaatcgtttaggagcaaattctttattatcttgcttatatgcaggattagtcgctggagatgaagctgcgcgatttatcgaatcttttggaagcagtccctactcgcagcaagatcttaaacacgccttgcaacaggaagaagagctctcccaggaaattttatcgcgtaaaggaggggaaaacattttttccttacatgaagagatcgcgcgagtgatggttaataatgttaccgtgaaaagagagaataacgctcttgtagaaaccttgcagaagttaaaagagtttagggaaagattgaaaaaagtttccgtacatgattcttctcgatttgctaataagactttccattttgttcgacaaatggagcctatgttagaactagctttagcgatcactaaaggggcgttattgagaaacgaatttcgaggatctcattataaaccggaattcccgaaacgggatgatgtgaattggttaaaaacgaccattgctacctattctgtagacgagcctgaaatttcttataagccagtagacactcgtcatgtgaacccagaattacgagattatacacaacggggagagaaagacgtagtgttagagaatattccaacgaatattcatttccctatatag

SEQ ID NO: 127 - DNA, 2079 bp, Chlamydia muridarum
atgattcggaaatggagtgggattcttctttgtttgttgttcagctgtgcttcttgtttttgcatagaaggaaataatgagaaggcgactcctactgtagagcttgtgagtgaaagtgaacaagctgttaagggagaggttgttcgtattggggcgcttattgctatccctaaaggagagcatatctattggaagaatccaggaaagtttgggatgcctttaaagatttcatgggaccttcctgcaggatgtgagttgctagaggaacattggcccactcctgaaatttttgaagagcctggggatgtttattttggttataaacattctactatggttgttgctgatgttcgtgtttccaaagagttggaaagtagtcaattagagataaagtctcgagtagagtggctttcttgcggagaggcttgtattccagggtcttctgagagaacgcttgtattaccagtgggtccaggaccgttaatccataatggtaaagatgctgcagctttttctcgtgtgttagctgctcaacccaagcagttggataaagcaattaccatctcttatcagtcagacggattggatgttcttgtaaaggaagggccatcccatggggaagtcaaagcgtggttcattgcagaaaatacgcgggactttgcttatgctgagggagcctcagtaggtaaagagaatgaacgcgtgtggagacttaagcattttgaaggaaacatgcctaagggagcaagcttatccgggctccttgtgttcacggatgactcaggcagggtagtagcctcttatcaggtgcgcgatcatcaggtgcaacagctgccggcatggagttggggattcctttcgattcttcttatggcttttgttggggggatcttattaaacatcatgccttgcgttttgcccctgattaccctgaaggtatttagtttaattaagtcagcttcagatcatcattcctcttccgttgttagtggtgtttggttcaccctaggagctattgcaagcttttggggattagccatttttgctttgctattgaaagttttgggacaaaatattggttggggttttcaactccaagaacctatgtttgttgccgtcttgatcatgattctcttcctatttgctttaagctcattaggtatgtttgagatggggatgatttgtttaagcttagggaaaaaacttcaagaagaaggaggagcttctgcaaagaaacatcaacggtggggggcttttttcaatggagtattaacaactttcgttactactccttgtacaggcccgtttttaggctccgttttggggttagtcatggctgtttctttcattaaacagttagcgatttttaccgctataggattaggaatggcaagtccgtatctcttatttgcctctttcccacggatgttagccattttacctaagcctggtccatggatgggtacgttcaaacaattaacggggtttatgttactggctacagcgacctggttgatctggattttcggagtcgagacgagtacagcagcagtgactattcttcttataggactttggttggctgctataggagcctggattttaggacgatggggaacccctgtatctccgcgtaagcaaaggttgtgcgcttccatagcctttatcttttgtattacgagttctttatttatagcctctgtaggagtgcgttactttgatgaagatgcgtatcctgttcaaagctcccattggcaagccttttctcctgagaaattagctgaattacgagcaaaaggggttcctgtttttgtgaattttacagctaagtggtgtttaacttgtcaggttaacaagccgcttctttatgctaatgcacaagcttttgatgctatgggcattgccacattagaagctgattggacgaaaaaagaccctcaaattacggaagagttagcccgcttgggacgagcaagtgttccttcttatgtgtactatccttctgggaatagagctcctgtagttttgccagagagattatcgcaagcgactttagaggagatgatttttactaagtag

SEQ ID NO: 128 - DNA, 588 bp, Chlamydia muridarum
atgggatcactagttggaaagcaagctccggatttttcgggcaaagcgattgtatgtggagaggagaaggagatttctctttctgatttccgtggtaaatatgtgattcttttcttttatcctaaagattttacctacgtttgcccaacagagttgcatgcttttcaagatagattaggtgattttgaagagcgtggcgcggttgtgattgggtgctcagttgatgatatagagacgcactctcgttggctagcagtagaaagaagagcgggaggaatacaagggacccaatatcctttgttagctgatgactctttagaaatatctaaggctttcggggttttgaatcctgaagggtctgttgccttaagagcgacttttttgatcgataaagatggggttattcggcacgcagttattaatgatcttcctctaggacgttcaatagaagaggagcttcgtgttttggactcgcagattttctttgagaatcatggcatggtttgcccagcaaactggcaatctggagaacgtggtatggtgccttctgaagaaggactaaaagaatatttccagacgatagattaa

SEQ ID NO: 129 - DNA, 2628 bp, Chlamydia muridarum
atgtcttcttactatttaaatttccgtcccaatactgtatctggagaaggtttatttaaaatcaaactgacaaatccttgttcagattttaaaaaccgagcaaaaccagctattgatattgaggagttgaactctggactttatatacttagacgattgtctgtagctttagaagccgggtatcttggtgttggttctgtcattaacccagataataaaattttccctggtggagaggggattgtaagaagatttcaggaaggcagtgttctttcttctagaacgatttctggtaacacggttgccgatattaaacaaagtacagctaagacgttagtcactacaatttcagatgggttgaatactttgatagaggatatccctgagcttcctatgactcaggtagggagtatatcggcagctctcattttaatggagacttataaatcaaaaccttctctgaatgagacagagcaaactacggtttttggtaatgcgtatgttccttctgatgaatccattaaagccatcatcaaaaaagaaatggaacaagaaatccaagagaagaaagatcttattatcaccgcacagttaacggcacaaggagcttccgatcaagcgattgaagagtcgttgagggattatgaggaattctatgtttctgagtattttaatacacatgtgaaagaagatctctggaaatatcgtgcaactattggggcaaatattcaggagatgttagaaaaatgttcggcattgggtccggatattccaacatctttaacaaaagataatgtcaaagaagctaatgctaagtcggtactgaaggcatggatggaagccttcagcaatgttttggaggtcgaaccggccttggggggatctcaagagatcattgaagctgtgcttaaaatgatcccttatgcaacaaaaaccactttaaccgacgaggatattcataagatttatgagcaagccgctttgccctctccagaggtgatggattattatctaaccaagcaagaggccgggatctgtaaaggagcggttgttaaggcgtttcagcaagctacgcagaacctacaagctgtgcgtgctgatgtaaaggagaacattgaagagttagaaatcaaaaaaacatctttccaacaagcacaggcatctttagaaagtatgttggaaggggttaagcgtttaaatgataacaaagcgtttacgtctgtaagattagcatctgtaatggagtgctactctgggcttatggcattgtcgcaaatgtctaatgttttagaaacaaatggaaaaacactcatcacggaatatgtaaatcgatttttacagttgaacaatacaaacacagcacaaactttagcacatgtaatatcttacatggcagcgtattgtgaggtggctgaatgtacaatggcgactacgtttttaaatcaaaccgaggtcattccatatgtaaacaacaaattccaagagcttcagcaacagccattttgtgctactttggcttctccaggcgtggcggaattaatgaagaattatatcgatttcacgaatggaatttgcaaagcgaatttcagcaatttcgtagataatgtgattacgaaagatttagatctttctgcagcagctaatcaggctcaggctatgcttggggagtttcagaaaaaagccgaagagtatctcaacacatttcaaaccgagatagataatctcaataaagtgtataacgagttggatccggcaaaggcaacattcaatgttggtattggaaatcaagagactttgcatgagaaagctgtaaataattggatcgagtctacaagtttagggtctgcttttatccatcttgttttgaatacacagattcctaaacaggaaaatttcttgaatcctttgattcaggaagtgaattttaataacgtagctgcaaacgctgttaatgaccttctgtcgattacaaataacttctcaacatcctctgtgtactataatttgtcctcttaccttgtcgagagtaaagagggggtagactatttttgtggagggttctttgagtttctttgtgctttcgctaaggagcgtgagtatatccttagggacatcaatagttgttatcgagctcaggcttttggaaacgctttgcttgcaagaatagaggctatggctgctggtaataaagtgactgcagctcaagcgaataacatgcgtacgcagacaaacttatacctggcttttattcggattattgttgaacagttgtcagttttagactctttgttaagaagtctaaattatcaacctctgcaaaaagatggtaattacgataaagataagtatgagattaaggggcccacggattggatttcgacactggctagtttggaaggttacgtcgttaatggatttgatagcgcaagtccttcaggtggtttagggcctatgcatacgctagtgcaaacagatcaacatgattatttaacacagagccagacccaacaattgaatttgcaaaatcaaatgacaaatattcaacaggaatggactttagtttccacctccttgcaagttctcaacgggattttatctcacttggctggggaaatttactctggctaa

SEQ ID NO: 130 - DNA, 2487 bp, Chlamydia muridarum
atgtcttctatgaacacatttaatagaattaactctatttcaaaagactacatgaaaatagaagatatttttctttctgcacccaagaacaaaacgttcttcatcaatcatgtcatgcagtttcaaaaaacagaaatagaacgaaatgctattcataaggttctctctcttttagacaatgacgtgcaggctcaatacgagcaactcgtaacttccctatcctccaacacattagctacaactgctcaaccaacaaaagattcatctgcaattacgtatgaccctccctcttcaaaccctctttacaatgccgctaagcaagcttgggcgcacaatgtattagctgattttctgaatgttgtaactgaagcaaaagcaaaagccgcaacaatctcacaaaatgaaacagacttaaaggctttaaccaatctatcttccgtattaactgctcttgtcaacaaagctaaagatggagagctttctcaagaaaactttgaaactttttatcttcttcccgaccaaatcttttctgctattcaatctttcccttttgaagggaatcaaaaagtactcttttctaatcagttattagctgcttttggagaagatggctctatagaacaaatattcgcagatatacgaatcgaagggcttcaagatgttttaaatatcgtccaatcaaaactgtctcccgaagagttcgagtccttccaagaattacaaactgtgatagatactctccgagaatatgttgaaccttttgacgcagaaggattcaataccattttacaagttagcgaagcattatctgtggctattataaaaacctccctccccagcaacgaaaaaatagaactttgccgtgatatcgctgatttttacaaggatcaagttttatctatccagcacttggacactgtattaaatgagacgatttatataaatgcgcgacacaactctcttttcgctgaaattgccagccttgttgcatttattatgggaagtttcgctcccgttggattgaacgcaactagcatagaagtgaccaatgcttcgattgcaggggctttacaagctgttcgcgcaattgatgctcgttttcatgaactctctcccgatcaacaacaattagtcaatgaaaccgttgcaaagctcaatgatttccatggaggtgagtatattggagctgtgtgggcctatttcatagcagcaaccaccatcgcttctaaaaattcagtgtcaccggatgaaattaaacaagtattaactgctcaagcaaatacgattgcttcttctttttctctgactcaaacactaaaaactacgattaataatattgtcgctaaaaatggccaatttgaaactgtagtcgatggagtagatcggcaatacaccattttcagcagcgattctaataatcaagctgttcttaacccaattcttctcaactttggatctataggatttttacctaatatcaccgaagcagcaaatacccattcagaaacttctgcgcgcgcattttttagattcaaagcgttagctcaaacagaaaatgcaaaattggacgctactctacaaggtagtgaagactttttaaaaaaaatcaaccagctaagaaaagatcttttttcttatcaactgcttgcacaatcacacgaaatacgctctcttcctctcccagcggctgtggcttcagtgttaatagatcgatacatgcctaaagaaatcgactatttaacacagatgaaatccgacctatattacagcaacttagggtctagtgttgggaacgctatgattgaagccatttctcaattcgtaaacggatctacatatttcaactttgcaagctttgctggccaacaaccaatgacagggatgcatacagataccttcccaggatcgcaagaaactgcagcagcaaaacttgctttagaaaaacaacaaaccaaactttttatacaatacactaatcaagcattagcggttgtacaacaacagctagctcgtgtcaaaaatgaccctgtaattaccaatgagcaacgactacgcattctggatgcgttaaatagttatgccgataacctaaattccatcaacggctctctagtcttattacaagtctatctcaatccattaagtgtgggagtacgtgatgggaaccagggcggaggtgatacaggaaaagaccctgaaggaactttccacgtatttggaggtcaagagcagtggcaagcgcgtttagagacactagaagatgctcttgtctcaggactcccttcgaatatcattaatggaggcttgttcccagtacaggcaactgtgcaagcagatcaacaagcttttgcggacatgggccaaaactaccaactagaaatgcaaatgcatatgactgctatgcagcaagaatggactgttgttgcaacatctctgcaaattcttaatcaaatctatctcggattgtccagaaaatttgctggataa

SEQ ID NO: 131 - DNA, 684 bp, Chlamydia muridarum
atggcaggtcctaaacatgtgctactagtaagtgaaaattgggacttatttttccaaacaaaaaaattacttaatcctgaagaatatcggtgtacgattggtcagcagtacaaacaagaagtatcagcagacctaattgtttgtgaatatgaattacttcccaaagatattcatgctcctaagtattttgaagctaactttgttatagttttattagatgtttttgatgaagagaagtgtatcgatcttttagatagaggattttggtttttggtgcagccaattactcctagacttctaaaagctgctataggtgcgtttctttctcaaggttctttgcattctgttcctgaaagtattcagtttggccctaatgtgtttcatattttgaaactgatagtggaaactccagaaggaactattcatttaactccatccgaatccggtattttgaaaagactgttgctgaaccaagggcaactttgtttacgtaaacatcttctagaggaaatcaaaaatcattctaaagagattgtagctagaaatgtggatgtacatatagcttctttaagaaagaaattaggcgcttatggaaatagaatcgtcactgtacgtggagtggggtatctattttccgatgacgaagagaaaaattcttcgcaagaagatacaaagctttcttaa

SEQ ID NO: 132 - DNA, 1590 bp, Chlamydia muridarum
atgttgagcaaagaaggtgatttttcaaaggagcaaagagagcgtttatcgcattttgtgactaatttggattcgccgatatttgctctgaagaatcttcctgaagtcgttaaaggtgctttattttctaaatattctagatctattttaggtttgcgagcgcttcttctaaaagagtttttagatggagaagggggagattttctcagtgaagaccttcaagattgtgaattaggcatccaaaaggctgcagatttctatcgccgtgtattggataactttggagatgattctgttggggagttagggggagcacaccttgctatagagcaagtatccatgcttgctgctaaagttttagaagatgctcgtatcggagggtctcccttagaaaagtcttccagatacgtttatttcgatcaaaaggtcaatggggagtatttatactatagagaccctattttgatgacttcggcctttaaagacacgtttttggatacgtgtgattttctgtttaacacttattccgaactcatacctcaagttcgtgcttattttgagaaaatttatccaaaagatcctgaggtttctcagtcggcttatacagtttctttacgagcgaaggttttagactgtttaaggggattattaccagcagccacccttaccaatttaggtttttttggtaacggtcgattttggcaaaatttattgcatcgtttacaggacaacaatcttgttgaagtgcgtaacattggggagcaggcgttaacagaattgatgaaaatcatcccttcttttgtaagtcgggcggagcctcatcaccaccatcatcaggctatggtggattatcatctaggattgagagaacaattaaaaagttttgctcagcgttatggagaagaaagggagccttctttagagaaaggagtaaagttggtttacggagaccctgatggtttatataaaatcgccgcagcctctatgttcccttactcagaacatacttatgcagatctgttagatatttgccgaaaaatccccgatgaagatcttatgctaattttagaatcgagtgcttcttctcgagaaaatcgccgacataaatctccccgaggtttggagtgtgctgaatttgcttttgatatcacagcagattttggagcttatcgggatttgcaaagacaccgtatcttaacgcaagagagacagttattaacaactaaactaggttactctatccctcaacaattgctagatactccgatggaggctccatttagagaggctatggaaaaagcagatcaggcttaccgtttaatagcagcagaatttcctgaagaagctcagtatgttgttccgttggcctataatattcgctggctcttccatatcaataccaggggattgcagtggctttgtgaattacggtctcaaccccaagggcatgaaagttacagacaaattgctatagacatggcaaaagaagtgatacagttccatccagcgtataaatcgttcttgaaatttgtcgattattcagaaacagatttaggaagactaaaacaagaatcacgccgcaaggcttaa

SEQ ID NO: 133 - DNA, 723 bp, Chlamydia muridarum
atgacagaacctcttacagatcaacaaataatacttgggacatcgacaactcctgtcgcagcaaaaataacagcttctgaagggatatccttaacaataacaaacaatgctcaagctaactcttcagtaaatattggattagatgctgaaaaagcgtaccaacttattttagataagcttggcgaccaaatctttgatggaatcacaggatccatagttgagagtgctgtacaggacattatagataagattacctcggacccttctctaggattgttgaaggctttctataacttccaaatcactgggaaaattcaatgtaacggcctattcacatctagcaatgtaacaactttattaggaggaacagaaataggtagatttacagtaactcctagaagttctggaagcatgtttttagtttctgcagatatcattgcatcaagaatggaaggtggagttgtattagccttagtaaaagaaggagatacacaaccatgtgcgattagctatggctattcttctggtgtgcccaatttatgtagcttaaaaacctgtgttactaattccggatcgacacccacaacttattcattacgaataggaggattagagagcggagttgtatgggttaatgctctatccaatggtaatgatattcttggaataacaaatacttctaacgtttcttttttggaggtgatacctcaaaaaaacacttaa

SEQ ID NO: 134 - DNA, 741 bp, Chlamydia muridarum
gtgaataaactggaaaaggaagctagcgtcttttttaaaaaaaatcaggaatccgtttctcaagactttaagaaaaaggtttcttcaattgagatgttttcaacttctttaaattcggaggaaaaccagagtctggatcggctttttttgtctgagactcagaatttatcagatgaagaatcttaccaagaagatgttttgtcagtaaaacttctgacaagtcaaataaaggctattcaaaaacaacacgtgctccttcttggagagaagatttacaatgcgagaaagatactaagtaaaagttgtttctcttcaacaaccttttcatcttggctagatttagttttcaggactaaatcatccgcctataatgcgttggcttattatgaacttttcataagtctaccaagcacaactttgcagaaagagttccaatcaatcccgtataagtctgcatatattttagctgctaggaaaggagacttaaaaacaaaagtctctgttatagggaaagtttgtggaatgtccaatgcatctgctatccgggttatggaccaacttcttccttcatctagaagtaaagataatcaaagatttttcgaatctgatttagagaaaaatcgacagttatcagatcttctcgtagaactgcttcgcattgtatgttctggagttttcttatctccttataacgaaaaccttctgcagcagttgtttgaagtctataagcaaaagagctga

SEQ ID NO: 135 - DNA, 2259 bp, Plasmodium falciparum
atgaatattcctcttatcattacgatactgttatttttattctaccaacattatgtatgtagtacaataaaaccatacgaaatagataaaagggatttattaaaaatatatgaagattataaaaatttggaattaagtaaagaggttgttttagataatgaagagagtttccataatataaaatatctgtctctatgtaatataaataataagaattcgatatccggaatatcaaatatactttgtaaaaatattaattttggttatcatataaaaataaaaggtgtagatcttttatatggtgagatagttcattttggtacatcgaaatttataaaggaaataaattttatatgtaaatattatatatatgataattcgtatgaaataataaaatgtaattatgttatcaaacttgatgagcattatgatttttatttagggtttgatatggaacatatatatgaacctaaatataagattgataaaaatcaaaacaacaacagaaataacaacaataataatgataataataataataataataattttattcaatcaaataatttacaaaataataatatgcattcattaaaggaacaagaacaaattgtattaaacaatgtaacatataacgaaaatatgaaaatagataataatacaaagaatatgtctcgaaataataatgatgataataatcataatattttttatcagaatgattatctcaattattataatagtcataatgtaaaaatgtgtaatttaaggattcctatttatagttatataacgaatgtagaagaaacgcttttgaaaattctgattggattatgtatcaaattaggatataagaggttcatgatatattctgaaaatacctttgttatttcaagttattttgaaaatatgtatattagtagagatatatttcatcagggatttaatataacttgtaggaaattttacaactctaataatatatatattattaagagtcaaaatagttttatacaaaataaaagtaatcataattataggagcaataataacatcgatgttgtgagaaaagaggttcctaagatttatgttaaattttttgctaataagtcttatttattgtggagagggattgaacagaataaagaaatctttaattttaaattattagaattaaaaaatttattaaaaaaagttaaatataaagaaaggatatatatatgctatactaaagaattatattcttattatgaacaagatgaaatctatattaaaaattttatgtcttctcataaaataaaatatcgtaatttcagatcattacaaaataaagataaaaaaaatttggatataccttattcttatatattattaacatttgaatatttttgtgatcatactattatattatttgaagaatgtgtacatattataatgacatcgaaaattttagatgaaaaatataaaagtattatgcatcaatttttatatgaaagttttctatgttctcaaaattgttcatatgaagatgaccaattaaatatttttcataatgatatgattatatcaacatttcaaaaatttataaataatagtaattctataatcgataaaatgaaaaaacaatctatatctataactgatcaaattaaaaagaaggaagaattttataataatatattattacctcaagatgaaaatatatacaaagaattttatgaaaatattatgttttctattgaatttaaatctttcatccctttgataaaagatgaactagataaacttagtagaaggaaaaatattagaaatgatagtaacaatagtaacaatagtaataatagaaataaccgaatttgtaatattttgaagtttattaaatatcatgaaaggttatatgaatctaatagccataatagtatatatagtcgattattaaatgaatccatattattaaataaattagtttttgaaaatcataaaggtgatcaccattttgatgacatttctatcatcaatctgaagaataatataaaattaaacaaagaaaatattaacacaaaaacaaataatgtggaagaaaatataaaaacaaacgaagaaaatattaacacaaaaacgaataatgtggaagaaaatataaaaacaaacgaagaaaatattaacacaaaaacaaataatgtggaggataatataaaaacaaacgaagaaaatattaacacaaaaacaaataatgtggaggaaaatataaaaacaaat

SEQ ID NO: 136 - DNA, 2256 bp, Plasmodium falciparum
gaagaaaatattaacacaaaaacaaataatgtggaggaaaatataaaaacaaataaagaaaatattaacattaaaggaaacaatgtggaggaaagtataaaaatcgtatataataaaaatgtggaaaataataaggctcagggaaatgaaaattttgaacatacgaataaaaaagaaataatatatattatgaatgatcctattcaatctaacaccacatataattccgaatcatatgaatctatttcaaacaatttagatgaaagtaatttgaataattatacttatgatgatgatgaaaaatatgatacggagcaaattaacacatttacaaaaaagtaccctaaaatgatgaatatgaaaatagataaaaaaaataaaataataaataataacgaattagaattaaaaaataataataaaggtaccatgcatcattctttcataattaattcttatggtgtatatatttatactttacaaaagcaatatgattatgatattctaaaaaaaatatatgatgaatataagaaaacacaagacaatacaaataatagtaataataacaatgatcatatgaaaaggaaagaattttttaatctactctattcaattaacaaaacatatacttttactgtcaataatgtacccacaaaaatatacgacatattaaacaaaacaaatattatttcaaaggataaaaaaaaagataataaagagcatcattcaaatatgtatgaatggggaaaaaaaaatgtaaaatacttctgcagtaaagagaaaaggtggccattttctaaaaaggaaattgatttttttacctctgatgatgctatttattgtgaggctcaatatgtaaacgagttcttaattactgtaaattatggagaacagacgtttgattatatgataaatgatatttatcaaaagggagatatgtttaaagatcaaaatatttatcaaaagggagatatgtttaaagatcaaaatatttatcaaaagggagatatgtttaaagatcaaaatattcatcgaaaggatgatgattatgaaaaaaatgaagatatacattcaaattcacattccgataaaaattcaaacattaattttatttttccagaaaaaattttacataaggtcaaagaagaatactttgtaaaacattccataaatgaaagcaaaattataggtttttatctacttaataatgcatgtgtaataaaatatattgggaataaaaaaaatgacataaataatccttttttaagtaatgttttattaaaatccgttttagggttttgtattttacatggatttacaaagttgaaagttgaagcagaaagtattaattatgaaagtggaataaaaaataaatttgtggagattttattaaatggatatactgaatatgaatatttaggtttgacgttaatgaatgtagctagattttcaaaagatttatattatattataacaggatatacttccaaaagtgatcttttattatctgctgttatgaaatttgaaaaaaattttaatatatatcataatatcgaaaataattttttgaaatatatgaacaaaaaatctatgaatttattacatgaattaacctttaattgtaatgatgattattatccatataaaaattgttatgatctttatcctctagtaagaaaaaatataaaaaatatatgtaatttcgaaacaaatagtatatataaagaattaaatttattatttcctgatgtgtgcaaaataggaaagaaaatagccttatgttatgaacaaattaaaaaatatattgtttgctcaaaaaatagccaagggtgtaaatactacaaatttataataaacacattcataaaaccaagaagaaaaacatccttttttattaatcataacataaacgttcaggaatatttatcaaaaaaggcatatacatattatttgttattatgtgaacttataaaaaataaagaaaaacaattaaaacaagaagaagggcaaaataaaaatcaaaatgtagaccatgcacatacttattttttattaaataatatcattcaatattccacattttttcttttctggaatttctctactgaattttggaagagatttcaatatatacataataatgatattcataatataaatgaaatttcttatcaaaataataacttgttattttgccccatggcatatgcctacgaatttatttatcaccttaatgtattttacataaacgaatag

SEQ ID NO: 137 - DNA, 2919 bp, Plasmodium falciparum
cccaaaagattggaaaatcgttttatcctgtacaacatgttaagggatcatataatcgagaaggaaggatttaaagacgttatcatatttgaaacggatgataacaatatttataattatgattcgaaattatctaaggatattcgaattttaagtaataaatttgagtttgaaattttaatggatgaacatgcttatataaataaaccttatgaatatttctatttaaataaatacatacctgtacattttgaattacaaaataagggtattataaattataataatatattttcttggttatgtgaacattttattaataattctcaatacaaatattattatcctcatttttatctttctaaacattctgataaaaatgatatgggcatacgtaatataagtttttaccagaaagaagatgcttatacttttatagaaaacaataaaaagaatataaataagaatgataaatgtaaaacatatgatacatgtgaaaaagatgatacatataggacagataaaaaaagtaaactaaaaaatattaatagaatatataacaccaaatatgcattgtcaaaaaaaaaaaatagaaaccataagaacaatgaaataaataatatatgttcccataaaaaagaagaaaaacatatgtttaataattataatataagttataataatatgaaatatataaataaacacaataaattttcatttctagaattaaaagaaaagttgaaaagtgataataatgaaagggaagataaaaaaaagaaagatgaatcatttgaaaaaaatgaaacccatctaatgaacaatgatgataataatattggtgatgatgaatttaattctgaagtaaataatgataataatggctcatatgaaagtaactttttttatgatatgattaacgaaatatctaacaaaattgaaaattcggattcatacttaaatgaagaagatatctattgggatgatgatattttttttgatactaatgaatatatagatgatactagtactattactactagtactaataataataatattagaactgatcaaaatggagacaataaaaaagatgattctaacaaagacattataagtatacaaaaggtaaatgattcaactgaggtaaatgaatctaataaaattgatgatacgaaaaaaggtgaaagttacactttaaataatattaagggatatataacaaaatttaaagatttcattcaaaataaatcagaaagttatgtgactactaagaataaaagtattgacgataaaagtagtgatgatcaaattagtgatgataaaattaatgatgataaaagtagtgttgatcaaattagtgatgataaaattaatgatgataaaagtagtgttgatcaaattagtgatgataaaagtagtgatgatatcaaattaaatgaagaacaaacttcgggagatcaaaatgacttatctgataataatgaaaataaccaagaaactataaccagtgatgatacattagaaaaaggaaaattagataatagtaacatgggtgatagtgacgaaaaattaaaagatgatatgaaaaataatgaacatgaaaatttatcagcagaaaatgtaccttctgatgaaaatacaatcaatgataaaacaaaagaaggcagtacaactttaaaaactgctatgggatatattacaaaatttaaagattttattcaaaataaatcagaaaattatatgaccactaaggataaaactagtgaagacaaaattaatgatgataaaagtagtgatgataaaattaatgatgataaaattagtgatgataaaattagtgatgataaaattagtgatgatatcaaattaaatgaagaacaaacttcgggagatcaaaatgatttgtatgataataataaagataaggaagaaactatatctagtgatgatacattagaaaaaggaaaattagataatagtaacatgggtgatagtgacgaaaaattaaaagatgatatgaaaaataatgaacatgaaaatttatcagcagaaaatgtaccttctgatgaaaatacaatcaatgataaaacaaaagaaggcagtacaactttaaaaactgctatgggatatattacaaaatttaaagattttattcaaaataaatcagaaaattatatgaccactaaggataaaaatagtgaagacaaaattagtgatgacaaaagtagtgatgatatcaaattagatgaaaaacaaaatgcgggagatcaaaatgatttgtatgataataataaagataaggaagaaactatatccatcgatgatgcattagaaaaaggaaagttagataagagtaacttgagcgataatgaagaaaaattagatgttagtaatgtgaaaaatagtgaagatgaaaatttatcagcagaaaatgtaccttctgatgaaaatacaatcaatgataaaacaaaagaaggtagtacaactttaaaaactgctatgggatatattacaaaatttaaagatttcattaaaaataaatcagaaaattatatgaccactaaggataaaaatagtgatgacaaaagtagtgatgatattaagttaaatgaagaacaaacttcgggagatcaaaatgatttgtatgataataataaatataaggaagaaattatatccatcgatgatacattagaacaaggaaagttagataagagtaatatgagtgataatgaagaaaaattagatgttaatcatgtgaaaaatagtgaagaaggaaatttatcagcagaaaatgtaccttctgatgaaaatacaatcaatgataaaacaaaagaaggtagtacaactttaaaaactgctatgggatatattacaaaatttaaagattttattcaaaataaatcagaaaattatatg

SEQ ID NO: 138 - DNA, 2529 bp, Plasmodium falciparum
atggaaaatcgcaaagttttgaggatagggaaaagtgtagtacacggtcgcacgggtcccttgagaggagacatggaggctgaagaacaaaaggaggtgagaaaaaaagaggagagtaataaaaaggatattataaaagaaaacaattctgataataaaaaggatgagcaatcaaaagtagaaacccagaatactgaagatattttaaataaacattataataaagaggatacagaaaataatagtggaaatatatttgaacaattattacaaagagaattagctaaaggtactttaggaggtggtgttgttgaaaagaatacaaataaactaaaatttcaaattgaagaaaataatattatggatactgctgatggaaatatagatgaagatatggaaaagttatcaaaaattagtttacaagaaagaataaatagtaccatagtaaaatatcgtatgcatgcttataatgaaatattgaaatgttttaataatcaagataatgataatcaaaagaattttttaatagataagaaaatacatattgtcaataatttttttaaagatgaagatagtatatttaaatacttatcagataataatttaatatgccaaataaaaacttctgaaattactgaagcttatttacatattataaaagatatttattttcataattacaaaaatgaatataataatgaagaagaattaattaattcatttgttaatgaatatcgaaataaattacataatatgtttttaaaaatatatattttattgatcgaaaaaatattaattaatacaaaatcttttgattttggttgtaatattattattaaaattatagaatattgttcatatgataaaattacactttctattattacaaccatttgtgaatatttaaattcaattttcttaaaagctaacaaaaatgtttctaatataaaaggtgtaaaaattaaagtcattgcctctattcttttattgttttataaattattacattcttttggtcctcacataatttgtgttaagactataaataaatattgtttaaaatttaatgagatgatggataaagctgtaaaaaccaacttctattctctatatatagaaatactaacccaagtaaatatacaagaatttcataattctatcttaaatgagttgagtagtcaacaaagaaattatataaataaagaattacaaaataaaccaaagcatacagataatacaactaatgcaaccactctatataaagcaacatatattttaaaaactaatgatcataataattcttacaattttatgaaaaatttcaatggtaatacatctgctgggaacggattagataatcatattgttgaagaatttgatgttttcaaagacatatgtacaaaacaatgggaaaagagagttctggaaggatgtattgataaaaataatagtactaataatacaaataataatagtaatagtaataataataatagtagtagtagtaaattattaagtaatgaaaatttattaccttggaaaattaaagtggaagctattaatttattatgtgataaaatgaaatcaaaatataatattaaaaaaacaaattatttatctacattattaaatattattttaaaattattaaaaagtgaatcagccttaccggttgttgtatctacattaaaattgttacatatacttattgaaaagtttgataaagacatttataatactgttaaaaacttctctttcattttatgttctaaattaaaagattccaataaacaagtttctaatgcatgtatggaatgtttaactaaagctatttcggtctataatatcgatttatttcttgatgatctatctaaaaatctaaaagataaaaataataatactaggttagtaaccctagatttcttgttgaagacattccaatatatagataagaagagtatatcctcgctcatagacataacaaaacatttattgaatgatacagtcgctaatataaaaaatactgcttgtaaattatatgcattaattatttcatattatggtgaatccgtggattcctccttttttaattctataccatccaacaaaaaaaagtccatcttatccttatgtgtaaagaatgacaaattgaatgatgcgaatgatgaaaatatttcgaatgatgaaaataatgcgaatgatgaaaataatgtgaatcatataaatcatggatacaatgatgaccatttaaatagtcctaagaatcaatttgaagattctagtgcaaagaaaaaaaaaaatgtagacaatataaataaaatgacaacacttaaaggaaataatatgaagcatacaaaaaataatatttccgatgatgctgaagatataatatctggaggaaagaaaaatataaatactgcacataataataatatgaacaaatcatgtaatatcaataatataaataatgtggaatattatttaccaaaggatatgattaaaaatttaggatcttctaatatccctaat

SEQ ID NO: 139 - DNA, 2526 bp, Plasmodium falciparum
tattatttaccaaaggatatgattaaaaatttaggatcttctaatatccctaataaaatcgaagggttacaaatgttaaatatatggataaagaatgaaaataacattatgatattaaattttgaagatttaattaattttattaaaaagaattgttacgaattcaaaggaaaaaatgttgtattgaataatgcaatatatgacattttttatgaatttatagatatagcatatcaatataatttaaaaaataatacttcattttataaaatgttgaatatacttattagtttatatattgaaaaggttacagataaaaaaggaaatatgttatgtaataattttttacataaatgttttatgtatttcgacaataatataataatagatttatttttaaaaaatatcgattctaagaatacaaagaaatgtgaagaatgtattaaaatattacaaaaaatttttataaacagaaataaaaattccggtgtgaatataaaaaatttaatttattttttaaaaaaatttgtggactctaaaaattcaaatcttaaaaagtcatcaattcttatgttacaaatattatctaagaattttggggacaagtatgtgctttctcatttagaaggaatatctgagaacatcaggcatatggtaaaattaaaagaggacgtagagaagtttgtaagtaagcacgggttaaattactcaacatctatccttttaaaggatatggataggcaacacaatcacataaatgatatggcaacacgtaatattaacattaaccttaacaccaccacagacatgaacaataataataatattaatagtagtaatgttagagattgtgaaacgtttaataaatgcgatattcacgaaggtgatggtaataatatcactattaataatcaaggaaaagatactgaaatagggagacacaaggaaaaagatactgaaatagggagacacaaggaaaaagatactgagacagagagacacagggaaaaagatacattcattaataatacaaatgatatgaataataatataaatcaacaaaataagaaagacgaagaaatgctagatataattattaaaaaaagagatttttctttagaaggtgaagaaaaaacaaataaaaaaggaacagtgaaatcaccaattaataattcttcaaaattgaataatatacaaattgattatacaaataattatttaaattataataatactaatatttctgataatactcctatggatatttctaaaggggtaaataatataaaagaaaataaacatgaaaagaattataaaaatgatgaggtgaaaaattatgcacataacgatgaagaggaagaagatgatgaagaagaaaaaatgattctcataattgatcatataaaaaattatataaatcgtataattagcgataataataataataacaatggaaataacaatggacataacaatggacataatattatttccaacagtgtgtcaaatattataaatgtaatagaaaagattggaaagtattatattaacccagaaaaattggatatattaattaatgataatatattaaacaaaatatataacaacaataagaataaatgcatacaattattatatgttcttatattttctttaaaggaaaatacacatatatatgcagatatattatttgaatttattgtttccataattgatgacattgatatatcagttgaacaaatagataagcttttaacatgtatgtgtcggaatttaggtatttctaaatatattaatcatattaatacatatatattaaatgaaaaattcaataacatgaatgatgactactccaatcaaaataatatgaatagtaatagtaatagttataataattttaatataacagatagaagtaaagaaataaaaaaaaattataaaagaaacaaaattttaatagttattaataatattaatacaaatcatattttattattaaatgaaagtgttataaaaaaaaaaatacttacattttatctagatcttttttttgatgataatgaacaaattagagaaagggcaagtattgttctagataatgtatattccaaatatggacgtaatgtcttttttttcatatatgaaaaattatcagcacataaaaaagaatgcttacaagatatactaaatcaaatgaaattaaataaagatgatttttctttttataaaatttttttatcaaataattcacaacttaaaagaatatcaatgaatgaaagtaatttaagtggaactacaccaaccttatcaaaaacaaaaagtgtaaaaagattaaactcattcactaaaaataaaactatgaatattgatttcccaacaaattataaaattaaaacagataaattaaaatgggacaaacatttagatcacaaccattccaattatttaatgaaagaatttaagtcttttgctactagcgaattaatatcaactatgtttagtgacaaaccacacataattaacagg

SEQ ID NO: 140 - DNA, 591 bp, Plasmodium falciparum
ctatacaactacataatcctcaattatctgtatgacaaaaaagaagacatgctaatattattttgtgaagataccattattcatataaagagtaagaaaaaacattgtgtcataagaaaagaaaatattataaaaattgaaatgtgctgtatttattttaatataacatttgagtgtgataaaaatattatctttaacattaaaaatattataaaaaagaataaaaataatttccttggtctttattttgacatactttttaaaaacaaaaacaaaaaaaggttaataaaaaaaatacagaaaaacctcgtaaaaattttgtacttcctttattatgtatttcattttatatataattataataaaaaaatagaaaacatgaacaaattaaaaaatactaatttatatcataatattaatcatcaacacacaaataaaaaaaaaaatactacttcttacaaatctaaagaacacccatttataacaatatttgtacaaaatcaaaaaacgatattttcgttttcatccataacatatttttatcacttctttattaacataagagatcaattatttaatacacccaattaa

SEQ ID NO: 141 - DNA, 2778 bp, Plasmodium falciparum
acaaacccttatgctattaacaattctgtgtgtagtcaaatatttaattttatacataacatgagaaaagaaataagacaaataaaatatattattcatactattttattttttaaaaataatgatcctatgaaacacatgcttctaaataataacaatttaaatgatatctctatgtgcttatttaattatatacaaaatgaaaatgaaataaataatgtgaataattatgtaaacgagataaacgaatgtgatgataaatataagtacacacaaaatgtttataacaaaaaagtatgtgttcattatatatcaccaataaatgttaaatcatcaaatgatgataatataaatagtttttataataacgagaaaagtgaatgtaattataatgtgtgctttgatgagggaaaacggaaaaatgataataacataagggatgataaaataaatggttacagcaacaataatgataataataatgaacataataacaataatgataataataatgaacataatgatcataataatgaacataataatgaacataataatgaacataataatgaacataagaattataaagaaagtacagataaactcaattttattcatttttataatgattcaaatcaaaaaaaagaaaattattttcataattatacacatgaacaaaacgaccatgaatcatcctcttcacaattttttggtatcccaaaaaatcaaacatcaatatatttttataaaaaagaaaaaaaaatgataaattttaaagaattcatgaaaaattatgaagtcaagaatattatgattttctttatctgttgtatattttatttaaatgaattgtacataaaatataataattcgctagtcacaaatattaaacctattgatgataatacaaaaagggatattcatcaaggagaagaaaggactgaaatttattattgcaagagtgataagataaatatgaatcaggtggataattcaaacaatacaaattgtaaagatgaagaacaatcaaacaatacaaattgtcaagatgccgaacaatcaaacattacaaattgtaaagatgccgaacaatcaaacattacaaattgtcaagatgccgaacaatcaaacattacaaattgtaaagatgccgaacaatcaaacattacaaattgtcaagatgccgaacaatcaaacattacaaattgtaaagatgccgaacaatcaaacaatacaaatagtagccacatgaaccatttaaaccatgaggtggttataccaaatgacaaactatatatgaatacatacacaaacaatattaacccttttgatgtatcaatttttaaagaggctgaaataatgattgaggaataccgtacatgtcttcatgagaacaaaaggatgaatatacttcatgatattctatgcaatattatattatgtataaaaaataattatgataatatacataatgtatttttattatttaatgatgatataacaaaaagtgatatattaaatataaaatatatttataagttaatagacaattattcaaaaatagattcatatataaaacatataaacaatagttgtaatgaaaaaataagaaatacagaaaataactttaaagaaataatttcgaacaaagaagatttgataaatatttataaagaaaatataaaaaataaaatacaattaattgaagagaaagatttaattattaaagacttaaaattagaaatacatattttattaaaagataaagaaattacaaataatttattaaatgaacttacagaggaaaaaaatacatattttaatatgtatatgaaatatcatcacgaatggatacttaacaagaaagaaataataatgaaagatgataaggacgaatatacttatacaacaaatgatgagcataataatcataagaaaataaataattgtattaaccaaattaacaaattaaatgatgaaatcatattattaaaaaataaaaataaaaccttgttacataaaagagatactaataaaaatacatcatcttctgtgtgttcacatatgtcatcaccatcaccatcacgtatttcatcaaatagcatttttcattttaaacaaacagataatcaaaatgttgaaaatgcagatccaaatattattatagataataataattcaaatacaaaagaaaaaaaaaaaaattctttaacaaatcttattttaaaagataaaaatgataagttaaaaaatttccatattaaggaaaatattacatctacaattcatatgaaaaaaatttataaaattttatttcttttaaaagaaaaaattattctttttattttctatatatataaaaagatttataaaaatgcttacattaatatttcatatattaaacaattttatacacaaattataaatatttttattaatatccccagatatatttgttcttcttatatatttgttaaagaaaatgaaataaattataatatgtatattaaaaataataaaaataataaaatatatttacacacaaatcatagccacattttacagcttactgatgataatacttcattaaataaacaaaaaataaatgaaaaaaaaaaaaaaaatcaaaatattaaaataaaaaaatattctcataataaaagaaatctatataatcataattttctagaaaatacatcaattcaatcatccacatctccccaaaaaaaaaaaaaaaataataatttacaacgggctataggaaaactctccgatgag

SEQ ID NO: 142 - DNA, 1704 bp, Plasmodium falciparum
atggaaattaaaacaatagtacagaactcatataattccttttctgatattaataagaacattaatgatattgataaagaaatgaaaacactgatccctatgcttgatgaattattaaatgaaggacataatattgatatatcattatataattttataattagaaatattcagattaaaataggtaatgatataaaaaatataagagaacaggaaaatgatactaatatatgttttgagtatattcaaaataattataattttataaagagtgatataagtatcttcaataaatatgatgatcatataaaagtagataattatatatctaataatattgatgttgtcaataaacataatagtttattaagtgaacatgttataaatgctacaaatattatagagaatattatgacaagtattgtcgaaataaatgaagatacagaaatgaattctttagaagagacacaagacaaattattagaactatatgaaaattttaagaaagaaaaaaatattataaataataattataaaatagtacattttaataaattaaaagaaatagaaaatagtttagagacatataattcaatatcaacaaactttaataaaataaatgaaacacaaaatatagatattttaaaaaatgaatttaataatatcaaaacaaaaattaatgataaagtaaaagaattagttcatgttgatagtacattaacacttgaatcaattcaaacgtttaataatttatatggtgacttgatgtctaatatacaagatgtatataaatatgaagatattaataatgttgaattgaaaaaggtgaaattatatatagaaaatattacaaatttattaggaagaataaacacattcataaaggagttagacaaatatcaggatgaaaataatggtatagataagtatatagaaatcaataaggaaaataatagttatataataaaattgaaagaaaaagccaataatctaaaggaaaatttctcaaaattattacaaaatataaaaagaaatgaaactgaattatataatataaataacataaaggatgatattatgaatacggggaaatctgtaaataatataaaacaaaaattttctagtaatttgccactaaaagaaaaattatttcaaatggaagagatgttacttaatataaataatattatgaatgaaacgaaaagaatatcaaacacggatgcatatactaatataactctccaggatattgaaaataataaaaataaagaaaataataatatgaatattgaaacaattgataaattaatagatcatataaaaatacataatgaaaaaatacaagcagaaatattaataattgatgatgccaaaagaaaagtaaaggaaataacagataatattaacaaggcttttaatgaaattacagaaaattataataatgaaaataatggggtaattaaatctgcaaaaaatattgtcgataaagctacttatttaaataatgaattagataaatttttattgaaattgaatgaattattaagtcataataataatgatataaaggatcttggtgatgaaaaattaatattaaaagaagaagaagaaagaaaagaaagagaaagattggaaaaagcgaaacaagaagaagaaagaaaagagagagaaagaatagaaaaagaaaaacaagagaaagaaaga

SEQ ID NO: 143 - DNA, 1698 bp, Plasmodium falciparum
gaagaaagaaaagagagagaaagaatagaaaaagaaaaacaagagaaagaaagactggaaagagagaaacaagaacaactaaaaaaagaagcattaaaaaaacaagagcaagaaagacaagaacaacaacaaaaagaagaagcattaaaaagacaagaacaagaacgactacaaaaagaagaagaattaaaaagacaagagcaagaaaggctggaaagagagaaacaagaacaactacaaaaagaagaagaattaagaaaaaaagagcaggaaaaacaacaacaaagaaatatccaagaattagaagagcaaaaaaagcctgaaataataaatgaagcattggtaaagggggataaaatactagaaggaagtgatcagagaaatatggaattaagcaaacctaacgttagtatggataatactaataatagtccaattagtaacagtgaaattacagaaagcgatgatattgataacagtgaaaatatacatactagtcatatgagtgacatcgaaagtacacaaactagtcatagaagtaacacccatgggcaacaaatcagtgatattgttgaagatcaaattacacatcctagtaatattggaggagaaaaaattactcataatgatgaaatttcaatcactggtgaaagaaataacattagcgatgttaatgattatagtgaaagtagcaacatatttgaaaatggtgacagtactataaataccagtacaagaaacacgtctagtacacatgatgaatcccatataagtcctatcagcaatgcgtatgatcatgttgtttcagataataaaaaaagtatggatgaaaacataaaagataaattaaagatagatgaaagtataactacagatgaacaaataagattagatgataattctaatattgttagaattgatagtactgaccaacgtgatgctagtagtcatggtagtagtaatagggatgatgatgaaataagtcatgttggtagcgacattcatatggatagtgttgatattcatgatagtattgacactgatgaaaatgctgatcacagacataatgttaactctgttgatagtcttagttctagtgattacactgatacacagaaagactttagtagtattattaaagatgggggaaataaagaaggacatgctgagaatgaatctaaagaatatgaatcccaaacagaacaaacacatgaagaaggaattatgaatccaaataaatattcaattagtgaagttgatggtattaaattaaatgaagaagctaaacataaaattacagaaaaactggtagatatctatccttctacatatagaacacttgatgaacctatggaaacacatggtccaaatgaaaaatttcatatgtttggtagtccatatgtaacagaagaagattacacggaaaaacatgattatgataagcatgaagatttcaataatgaaaggtattcaaaccataacaaaatggatgatttcgtatataatgctggaggagttgtttgttgtgtattattttttgcaagtattactttcttttctatggacagatcaaataaggatgaatgcgattttgatatgtgtgaagaagtaaataataatgatcacttatcgaattatgctgataaagaagaaattattgaaattgtgtttgatgaaaatgaagaaaaatatttttaa

SEQ ID NO: 144 - DNA, 1053 bp, Plasmodium falciparum
ggatctcttacagggaaagtttgtttatacaaaataacgattaaagaaaataaagaaacaaatacaaacatatcttatgtttataataataataataatattacagatgatgagaaaaaatgtataaacgatttaaataatagagaggaattaaagaaagaaaactatagcaaatcaactatagatgatgtggttataagtaaaaaggaactaaataatcacaataatataaataataataataacaataataataataataataataatagtgagataattaaaaagtatcatattttatgtatgtttagaaataatagtataaaatcaatatatattgacaagaataatatatatatatgttatgaaagttgtattgatgttttttgtgtaagatcatatcagtttattcaaaagattaatttagatgtaacaaataataaacaagtaatatattatgagaactatatattatttaataactcaaaaagtttatttatatatgatataacaagtaatttttctagttatttttacaaaaatttcttaaaaaatatagtcatttttgattttaatataaattatttattatgttataaaaataattttgggaaatgtcatattcgtgtcctacaaatttttgctgatgctcaaaaatgtgaacatgagttaattttttgtgtagacttttcctctaaatttataagtcatggtaaatttctagatgatgaaaaaattatagttgcaaaaaatggtaaaagattaatcatatttgattttaaaaaagctatagatatgtatcgaatcagaaaactaaaaaaaaaaatattagacatacacaaatccgtagaaaatatgttatttatattagtagaaaatcaaatttttattttcaatttatctacatttgtattctataaaaccgtacaattacctaagggccttttttattttaagtggtcctatttcataagatataaaaaccgaaaaattattttttcatcagacaagggagtatattatatagattattccattgaagaaaatgtttaa

SEQ ID NO: 145 - DNA, 2832 bp, Plasmodium falciparum
atgaatgaaaataatagcaaaaatgttgttgtggataagcctattaaaaatgctgaagaagaaaagaaaaaggttgaagatataaatagtttatatgatatattgaaaaatgtgagtaataataatgatatttttaataatgatgattatattttaaaagaattatatcctttaataaaaaatgttataggagataataaaaatatttgttaccattataataaatcatttatgttaaaaagatggtgtttaaaaattttatatacattaataaataaaattaaggatatgaatttgtttcttgatatttttaatatgtgttcaaaactaattataagggagaatgagatgaattgtctgagttgtattaaaataatcaatgtaatccttgaagaaaataaaaataatttgaacatgtttgacgtagatacttatataaatgtgatatgtctatctattttgaaaaatttttataagaaaataatatataaggtaaaaaagggaaaattcctcaagtcttcaattagtatatatatgaaaaaaaaaaaaaaaaaaaaaaaaattgaaaaaaaagtaaaagtaaaggaaaaagaatataagaatattatttatttgcaaaaaaaaaaaaaagagagatatattttaaacagtacagattctatcaaagtaatcaaagaaatcgtattatctgttctttttataatacgtatatatccgaatgttataaataatgttgggaagtacttaaatatattatgtaaaatattatctataattaatatgtacgattttaaattagaatcttccttttttattgagacaattgtcgaagcgaataattattattcaaataataaaaatgatacaaatcaaaagaatgataagtccaatatgcatattattaaaaatgttttttattatcaatatataaataaatctgaaaacacagagcataaaaaagaatgtaagactaaccatttaataaatgtaccttccaaaatagacaagaataaatgttctcttttgttatgtaataataaaagtgatgagtttgataacaatggtaaccttcatcttatgtttaatgaaatatgtcatgatatggataagaacaaaatgtatgatggtttcccctttgatcataatcataatgcagctttggtaaataaattagaatgttttaataaaagtacaaatgattgtatttgtttggagttggagggtattcatagacaagaacttaatgagaaacaaaaaaaaaaaaacaaaaaaaacaaaaaaaaaaaaaatgaagacattaaaggggatgtaaaatatgatgttaaaggggatgtaaaagatgatgtaaaagatgatgtaaaagatgatgtaaaaggtgatataaaatataatgttaaaggtgatgtaaaagatgatgtaaaatacaatgttaaccatgtagacaattttgttaatgaccagacgaacaatagttcttatgttaataaattattatataataataattgcttgtattatgagaaatataaatggtatgatataaagaatgttattaatataaaatgttgtgaaaagaaaaaattttgtaaacatgttaattataacatgtatgaacttgatagaaataaacatatggacttattaactttacaaaatggtattatttatatgatttgttatttattaagagaagataaaaaaaataaattttgtcattataaagagtttgtaataaagaaagttatatatatgttaattaataatcaacatgattatattgaaaaaaaaaaagaatttattgaaaatatccgtatgtttttacataatagtttcgatgaacaaatgaaatattacatttcattttttttaaatccgtttttatataataaaaggaattatatatatataaataagcaaagcttattaaatatatatatattttctttaatccatgatatgttattatattataaaagtaagaatgtttggaattatgatacaattaatttatgtataagtaattttgtcgatgtacttatgcataaacaagcatatatatatattcaaaatgtttgtataaatatgtttgtatatataattaatatattatttatgattaagaagagaaatggaaccttcttttcattatatttttttattttgaatatcctgatgaataaatgtgaatctttaaaggaagaaatttataacaagatatataagcgcatacaaaggttaagaagaatatcaaataatagtaaggggcaggagaaaagaaagaataagataaaggaaaaagaaaatactgaattttataccgataataaaaaaaagatgatatgtaataattattatagtgattgtacatatgatacaaatcgttttgtaaaaagaagtataataaaaaatgtaaatatatataaaaggagtagtattattagtagtaatagtatttgtaatagtatttgtagtaatattaactatttatcgcttagtcgtgataaaaaatgtagtcattcaaaaaatgctttaaatttaaaaaataataaaggatataggaagactaataataatttgtatattattaaaaagagaaattaccataaaatgtatcatatacttatagcatataaatatattttatatgctcttcaggtgtgtataaaatataatatatattatatatatatatattttaatcaagatattataaataataatagctcgaatgtgttaatacaacaaggagatgatataaaaacatattttttaagaaatgatgatataactaaagacgataaaattactcagaaacaaaatcattctattcat

SEQ ID NO: 146 - DNA, 2544 bp, Plasmodium falciparum
ttaaaatgtttctcttttccaagaaaaggaactaacgataagacgaaggaaaatgaaacatttgaaaaaggagaagtaaaagaagaagaagaagaaaaagataaaaacgtcaaaaggaaaattattaatgaaagtagtaaaaataaaagagctaaagttaagaatgaaaatgatgttataaaaaaagggtcgttatttaattgtgttgtaagagaagatgaaaaagtgaatgatttgagctcacctaaatttaatcctgtacattttaatataaatgatttatatttatctgaaaaagataaagaaaaacataaatttaaagactccttattatttacctttttaacaaatgcatttaatcaaatagaagaattaaaaggtagtggtacaggaagtaaaaaaaatgtatctattatattatcgaatatatttagggttttaatatattatagccctaatgacttaataccagctgtatatataaccttaaataaagtagctcccgattatttaaatgtcgaagctggtgtaggtgaagccttgatattaaaaacgatgtctgaagcatatagtagaacggaaagtagtataaagaaggatttacaacaaattgaagatttaggaataatagcggagaattgttcttgtaaaatgagaacaatatttccgttacctcgcttaactatacaatctgtttttcatgagctaaaaagtatacctaaccttataggatcaaattcacaacagaagaaaagggaagtcataaagaaattgttagtaagtgctaaaacatctgaagctaaatatattgtaagatttttacaacagcgtttaaggataggtgtaaattctgcaacggtcgtacaagctttgtcatatgcctttatattaacaagacctagtatacctgatgatattataaaaagagggaaagaaattaatgagaatttgattaatggtaaattggatggtactaataatttaattaataaatctaataacaagacggaagagtggctaacccaatcaggtgataggaattgtataaaggaagaaaatttaaatgatgaattattatcaaaggatgatataaataaatgtgaaaacatggattcattaattaatgagatacgtattcgaaatgaaaaaataaacaaaccgaatattttttataaccttattgaaaaggtgggtgacacacgattattaccattattttttaaagaattaaaaaatatatattgtgaagaaaataatgatattgatatatttgaatgtatggaaaaatcagttaagagtgctttatgtgaattacccaatatcgaaataataatacaaaatttattaaatggtgatgatatgaataccttaagtaaaaaatgtactgttaaaacaggtattcccgttcaacctatgttagcaaaaccaactaagggtgttcaagaagtgttggatagatttaataatgttacatttacttgtgaatataaatatgatggtgaacgagcacaaatacattatatagataaagataatataaaaatattcagtcgaaatttagaaacgatgactgaaaaatatccagatgttatacaaataataaaggatcaaataggagagaatgtaaaggaatgtattatagatagtgaagttgttgcttatgatatagttaataataaaatattaccattccaagtcttaactactagaaaaagaaaagatgtagatatagaaaatattaaagtgaaagtatgtctttttccatttgatttaatatgttgtaatggtataccagtaattaaagaacctttagctgttagaaggaaattattatattctttattaaagtcaaaagatggggtgttatcatatgctacccattctgaaatgaataatattgaagatattgatatgttcttacaagatgctatcgaaaataattgtgaaggtttaatggttaagactttagtagaaaatgcatcctatgaaccttctaggagatcattaaattggttaaaggtcaagaaagattatgttgaaggtctttcagattcggttgatttagttccgatagctggttattatgggaaaggaaaaagaagtggagtatatggagcttttgttttagcagcttataattctgaaacggaaaattttcaaaccgtttgtaaggcaggtacaggttttagtgatgagatattaagtacattatatgaaacattaagtgaaaaaattataccaaataaaaaatcgtattacgaagtatctgacaaattaaatcctgatgtgtggtttgatgctcactatgtatgggaggttaaggcagcagatttatctttgtcacctgtacatacagcagctattggtatatatgcagatgataaaggtattggtttaaggtttcctcgatttttacgtttaagagaagataaaaatgcagaacaagcaaccactacacaacaaattgtagatttttatgaggcacaatttagtagtaataaaaataaaaatattgattataatgatgatactgaaagtgaataa

SEQ ID NO: 147 - DNA, 582 bp, Plasmodium falciparum
gaattattaaccaaggcggttaacgaaaatggagagaaacctgacgaagaagtgaaatccgtcttgtacgacaatgtagacaaaaaatacccagatgtaaaactagctctttgtcgtattagaaatagcttaaaaaaaggtagtgatcatagcacgggaagtgtatttattgtaacatttaaaaaaaactttccacacaagaaagagaaaaatatgggtatggtatatgttgtaggaccaaaaggaaagaattacaattcagtggaagaatttttagatgaagttcaagaaacagcagaaaatttaatgacaactctttgtgattataacggtttagttaaaagagaagaaattaagcatgtaagaatgaacacatgtagaatctgtttattctcaggtagtatctttaaacatcctaatgcctctaaattagatgtagctaaagctatattaaatggattagctgttggatatagacatggaccatcaccaagattaaattttgcttatgacgaaaatgtatttaaagacgcatgggtagaaaccactggattacaagttttcaatcacaatgagcaataa

SEQ ID NO: 148 - DNA, 2580 bp, Plasmodium falciparum
atgtatccactatactatgagaaaaaaatcgtaaagaaattgatagaacaagattccttaataatattagcagatggatttaatgaactaaacattttagcaatttttatattttattatcaaaacaggtgtttatgggatgaacaatatataaataacgataacatattttttgatttattcaatttgaataaatataataaaacatatgacaacggacatataaaagtggtacaggatgatggacaagaaaaaaatatacaaaatgaaagtaccacaaaatatacgttaaataaaaataaaatacaaaatgataatgaagtggaatattatatagacgactcggataattctgatgaatctaaaaaatatgacaagtctaaaaaatatgacaagtctaaaaaatatgacaaattcgatgttaccacctgtcgaaaaaacataatagataacctttttgataactatacatataaggaaccaaataatgaatttccaaaaaataacaatgaaattatattattagaccatcctgaggaaaaagaaaaaacggagataaaggaaaatgacattgatattaataagaagaatgataattgtaataatatgtgtaatattaacaaatcacaaaacaatcatttaaaagatatgtgcacccaaaataaactgatttttatattaaacgtcactcctaaagaatacaatatttttttgaaatatcaattatccttatatgaacaaattaatgaaatagatgaaagatataatgataaaataaaaataaattatttcaaaactgaatatataagagatcaaaaatcacacgaaagaatagagatgtatataaagagaggtgtgtacttcatttcttctaatgtgctactaatagatttattaacatttaaaataattcctgaaattattgatggaatatttatttgtaaaaatcatagattgatatataatatgaaagaaatatttattatcgagttatataggaaaagaaataaatttggttttattaaaggaataagtaataataaaaaattaataaatcatcaacatattgttaatttagctcagaaattatttatgaaaagaatttattgttatccaagatttcataaacacatacatatatcgttaaataataaatttttacaaccacacatatatgaaattaatcttgatattccaaatgttcttttaaaaatagaagaaaatatacttaatattttacattaccttaatctagaaataaaaaaaaattataattttcatgattttgatttaaaccctttattatattctgaaaatgcagaagcatatgtacttaactatattaagacaaaaacacttaattataatactaaaaagttattaaaagaaattattacattagttaatatgttatgtaatttgtttatatatgattcacttatattttataattatcttaataatttaaaagaagcagataaggaatgtatttggttatattgtaatgaggctaacgaaattttttatttatcaagagaaagaaataaccaatttttaaatcaaatggatatattagtcaatcaaaatgatataaataatacacaaaatattattaatgtcatacagtatgataataattattttcataaatcatatcaagttaaaaaagaatctaatcaattatataattgggtatatgaattagtttataatagagatattgaaaaaaaccagtatgaaaagataattgaacagaaagaaagaatcaaaaataaaaatctcatgaaaaaaaaatttatattaaataaaaaaaaacataacgaatcaaataaaaaacctctgaaccataacaaacatacagaagacagaacatctattatattaaacaataacataaatataaaacattcaaaaaatggtaatagtaatagtaatactacagaaaataacaataaacgaaggaaaataataaaattacaaaaatttaatgataataatagtaataatgaaaatatgtataatttaataaaaaaagaaaaggatcatattatacaaataaaatcttcagatactgaagataattctgttaataacaaaaatggtattattaaatctgatgaacatatagttattaatgatcacaaagaatgtaaataccagatggataaaataaaccttgatcaaagaaatgataataacattatgcatatgtataaaaatcaaacaaaaataaataaatcaatggataagatagaatatccaatagtaataatagttgacaatttttatatgcaaaaagaattttataatttgcttcttcacacaaatgatgataaagttaaaaatacggatagcataactaacccaaacaataatcataataataacaatagtggtgacaataattttgagtgtgacaaacatttaaatatacttattaaagacgaaaaagaaaataaaattactgacaattatattaccgacgattctgttagttctcaagaaagttttaataataataataataataataatgtcaacatgtcaaataatgcaaaccttttcaatctacaaaataat

SEQ ID NO: 149 - DNA, 2142 bp, Plasmodium falciparum
atacatacagatttgttattaaattttttaatttatatatattataaatatttttattataattcacacgctattgatcacaactttacacattttattcatttatttttgagtattcatgaagaatcatataataatagtcttattatgattgaaggtaataaaacaaaggaaaataatatagatcacacaaatcagaaggatatatttgtaagaaatttatttatgtctcttgataaatgtaactataacaaattagggaataatagaaaaaatatgaagaatattacaaatgatgatactcttttaagaaacaatataaataatattacaaatgatgatactcttttaagaaacaatataaataatattacaaatgatgatactcttttaagaaacaatataaataatattacaaatgatgatactcttttaagaaacgatgttcttaaaaaaaatgaaataattgatgataaaaaaggtatgagtataaaacaatatagcattaaacataaatcattttataacgaggaagattatatgagaaatgatgataataataataataataataatattatatataaagatgcaaataattactatttagtattattaaattctcaaaatagatatatacaaatactattttataaagtgttatgtaattttataaaatgtaaagtacaaacattaaatgctaagaatttatttaagaacgtaaacttttatttatcatcttttgtaacatattcatttcttaatacatataatgaagacaacaatttttattacaaggctttaaattataaatactccttttatgattttagtacacttaagaaaaacattaagttgtgtatatatttgaaaaatttatatttaaagcatgatatgtttaatagtgatatattaaattttctgcatattgagggatataaaaatagaaaactgaggaaagctaaaacgaaaattaaaacgaaaattaaaacaaaagaaaaaatgaatgaaaaaataaaaatgggcaagttttattctagtgataatataaaatatgatcaaaatgggtgtaacaaatatgagggggaaaatgatgtatcacataataacgttttagagaatcacaagaatagtagtagaaatatatatggatatacaaatacttatccaaatacatatgttcaacgtgattaccataatgtgaaagaaactcatgatgtgttatataaaaataatgagaaattaaattataaacgttcttttgttgaagatgatgcgataaataatacagcggtagttattaagaaatacaaactgaataatattgataatgctcatgatagctataatgataatgtaaatatctcagaagggtccgtaagtgttgaagaagaaagagataatagaaaaacaagaaaggattatggtaattattctgatgataaagaaggatgtaatattaattgtaatatttatgatatgaataatcaatatggaagaataaaaatcgaaatggaacattctaatgattgttataatgaaagaaataattatccaatgaatcatgcatgtcatgtagaaagatgtaatatggaatataaagaagaaagtaataatataaaaaacacaaaatatgtttttgataatacaaattgtatgaatataaaaaaagaaatttatacggatgaagatacaattgattctatagattcattaaaacaagcagaaatatttaagaacaaattttataaaaatcgcaaaataaaaagagtttctaagaaatattatattaacattttaaattatcatttaaaaaataaggtgcatggttattcaattaaatctttggatagtttaaaattggatgataagtctatatatttaatatttttatttctagggaatatttttactgtattatataattctttattaccctattgtggttcacagcataaatataaaatgataaatgatataaaaagcaaaatggagaaaaaggaaaaagacaaaattgtagtgaatataaacgaaaatatgtcaagtgattatgcatataaaataacaacagatagtaatagtagtagtaacaataataataataataataataatagtggtggtaggtttagtagtacgaag

SEQ ID NO: 150 - DNA, 1659 bp, Plasmodium falciparum
atgaaattaacaaaaggctgtgcctataaatatattattttcacagtgttaattttagcgaatattctttatgataataaaaaaaggtgcatgattaaaaaaaatttacgtattagttcgtgcggtataataagtcgcttgctcaaatctaattcaaattataatagttttaataagaattataatttcacgtctgctatatcagaattacaattttccaatttttggaatttagatattttacaaaaggatatatttagtaatatacataataacaaaaacaagcctcaatcatatataatacataaaagactaatgagtgagaaaggagataataataataataatcaccaaaataataatgggaatgacaataagaaaagattaggatctgttgtaaataatgaagaaaatacttgttcagataaaagaatgaaaccttttgaagaaggtcatggaattacacaagttgataagatgaataacaacagtgatcatttacaacaaaatggtgttatgaatttgaatagtaataatgttgaaaataataataataacaattctgttgttgttaaaaagaacgaaccaaaaatacattataggaaagattataaaccaagtggatttataattaataatgtaacattaaatattaatatccatgacaatgaaactattgtaagatctgtacttgatatggatattagtaaacacaatgttggtgaagatttagtttttgatggtgttggattaaaaattaatgagataagtattaataataagaaattagttgaaggagaagaatatacctacgataatgaattcttaactatattttcaaaatttgtaccaaaatctaaatttgctttttcatcagaagttattatacatccagaaacaaattatgctcttacaggtttatataaatcaaaaaatattattgtttctcaatgtgaagctaccggattccgtcgtatcactttttttattgacagaccagatatgatggcaaaatatgacgttacagtaactgctgataaagaaaaatatcctgttttattaagtaatggtgataaggtgaatgaatttgaaataccaggtggtcgtcatggagctagatttaatgatccccatttaaaaccatgttatttatttgctgttgtagctggtgaccttaaacatttaagtgctacatatattactaaatataccaaaaaaaaagttgaattatatgtatttagtgaggaaaaatatgtatctaaattacaatgggctttagaatgtcttaaaaaatcgatggcatttgatgaagattattttggattggaatatgatttgtctcgtttaaatttagttgctgtttctgactttaatgttggtgctatggaaaataaaggattaaatatatttaatgctaattctttattagcatccaaaaaaaattcaattgatttttcatatgcaagaattctaacggtcgtaggacatgaatatttccataattatacaggaaatagagttactcttagagattggtttcagttaacattaaaagaaggtctaacagtacatagagaaaatttgttttcagaagaaatgacgaagaccgtaactactcgtttatctcatgtagatttattaagaagtgttcaattttta

SEQ ID NO: 151 - DNA, 2346 bp, Plasmodium falciparum
tcgattataaattctattaatagagataaattaaaacattccaaaccattatataagaacaatataaaaacgaatgatgataataaaaaattaagggaaaataaaacgaaaaacaaaagattagtttcaaattatttaggtaatttattttatataaatgaaaataatgaagttataccattaaatataaatattaaagatgttgtaaataattccccatttaaatcccctctgtttcctaacatggtatttattggttcacgagaatctactattattaatttagattatgacacaggacatgtactaagaaaatatgatgaagcatctaatgaattgttagacaaacccccaaaaaaaaaatcaagaaaaaataaaagtataaaaaatgtgaaagatataaatgataatatgaagttatataaagaaggtagtcaaaatgtagaggagttatcctttaccgaggaggagaataaaaagaaaagtattttagagggtgagaaaatagaagtggcgtccttaaataatgaagagaatatgaataaaggttttgtgtgtgaaaaggatgataaaataaataattatgataatgatgaagatgatctattctatgaacaatatgaagacaacaatgataatgataataataaaaatgataataataaaaatgataataataaaaatgataataataaaaatgataataataataataataataataataataataatagctattattattataatattaatggtaatgctagtgatgatatattagtacattcaaaaaatgaattattaaataatacgtatataaataaaacaaatataaaagatgaaaactcaaataataatgaatcatttctcaataaaattgatgggatgaataattttaaattgctaccaaaaagaaatatgaaaagaaatagaaaaaagaatctccttaagagacttatggtaagtacaaataaactgagcatgttattgaatagatatcatttaattaatcgtagtttagaaagaatgagaaaagatattaaaagagggaaaaataaaagaatattaaaaaaacgtcaattacaaataagtttaataaaatgggtaatcaaagcagtagatgagaatacattaaaaaagaaatggataacaacttgggttgatgttggatctatatttatgacagatgttcataggaaagatacatcatttataaattccttaattgaaattgttggaaataaattaatattaagaccaatagaaaaggacaaaatgaaaagtactacatatcaaattttaaagattatgaataatgacactgatgaaatacaaatgtatcgaaatgaagatatgaaatatgaagttattaataatgtggatgatataaataatgtggataatataaataatgcgaataatatgaacaatgtgaataatataaacaatatgaacaatatgaacaatatgaacaatatgaacaatatgaacaatatgaacaatataaacaatatgaacaatataaacaatatgaacaatataaacaatataaacaatataaacaatatgaataacattctaaatgataggttaaaaaatcgaattaataataaagataattccaacataaaatcgaaaatatttattttttcagaatccatatcatccgtttttgcagtaaaatataaaaatttatcaaatatatttacgttagatattatagcaaaaccaaatataaaattatattctgattatgataatttgaataattttacatataatcctgtacatgtaaaaaaagagagaacactttttttgccgttttctaaggatatatctgatttagatggagataagttttcatgtagttttgaagataatataatatatggtaaaagattaatacatcgcttaaatagtatatcagtaaatatttcttctatagaaaaagatatgaaatatttattatcaaatattatatatgtatatgacaagaataagaggattccaataagttatatatatgatatgaagaatttaatatatgaatatcaaaaggttaagcaagagtttttatatcatttaccttgggatgaaggagaccagaaatatttaagtcgaacggatgatgtattaaataatagtataatagataatataggtaaaaagggtccaatttttatttgtgaatatataaacaaatttatggatttatactttgaagagaatgatatttgttatgattattgttctatgttaaatatatgggataaaatttttaataatactgttagtgatggagattctttattattgtcaaatttgtatcgtgttgtacataat

SEQ ID NO: 152 - DNA, 2196 bp, Plasmodium falciparum
tttaaaaaagatgttctaatacaattaaaaaagaataatttccaaacatataatgatgtattatataaacaattgcaacatgtcattttttggttagatgattggtcatgtagtagatcctatggattaggaacttatatgccacaatttgatcaaaataatcaaacgaataaaaatgttgataattatcaaaataataatgagtatgtaataccatccaatgatgataataaccaaataaacaatcaccatatcaatgttgtgaaggaggaagaagaaaagaatgtacatataaaaaacaattcacgaaaagaattaatagagagtctatccgattcaactatatatatggcgtattatacggtgagtcattttttacaaggaagtgttgatggtcagaaaagaggtttattagatattagcgcagatgatttgaatgatgctttttttgattatatttttgatattagtgatgatacaagtaatatatctaaacatatatctaaggagaaattagtaagaatgaggagagaatttacctactggtatccttttgatgtacgtatatctggtaaagatttaatttttaatcatttaacaatggctttatttaatcatgttgctatatgggggaaaaaagaaaaatatgatcgaaataaggaagatgtggaagaaagaagtattttagatagacaaacagaaatattaaatgagttagaaaatattgatttatcaagttatgagaaaataaaatatttcccacgttcttttttttgtaatggacatgttttagtgaataaagaaaaaatgtctaagagtaaaggtaattttataaccttagaagaaagtatagctttatatactagtgatgggaccagaattgccttagcagatgcaggagattctatagaagattctaattttaatactgatacggcaaatagtgctattatgaagttatataatttgataaatttttctatagaaacaaagaataatgtatatatatttagatgtggtgagaaaacatttaatgatttgatatttgaaaatgaaataaattatttaacaaataaatgtaaagaatcctatgaaaaattattatttcgagatgttttgaaatatggtttttatgatatgttattaaaaagagatacctatagaatgatgtgtgataaaatacatatgcataaagaaacagtaaattttttcatagaaagaatctgtataattattaatcctattattccacatgtaaccgaacatatatggacttatattcttaagaaagatacatttttaattaaacaaaaatggccatcacctgaagaaaccaattattctatagttatgcataagcaaaataataatctattgaatgttgtcgaaatatttagaaaatcatatgataaggtaatcaataaatgtaacaagcaaaaggttgtgaaagataaaaatgtttcaaaggaaaacaagaatcacaaagatcttataaacaagataaataatgatgaacagaataaaaagaataatgatacaaatgtagagacacaaaatgattcttctgttcatattgaaaaagaaaacaataatgataatctgaagaagaacatacaacaaataaaacaaataaaccacattagcaacaataataataataaagataatatttgtgatgggcataataacgatatagatgaagatgatgatgaagaaagagatgatgaagaaggtgcaaattattataaagaagatgaagaagaaaagatgaagtttaaagcaatcgtttatgtagcaagggaatataatgatactcaaaagaaaattatagaaatattaaataatattattaataatagtgaagataaaaaattaccaacgaattatataaatctattagtccaaaatacatatgttaataatttaccaaaaaatgaaaaaaaagatatactcagttttgcaacttttctagtaaaagataatgttactttaaataataatcaatatgaattatcattaccctatgatgaaatacaactaattaaggataatgtagatttcataaaaagaagtcttaatttgggagatatacaagtattagaaaataataaaaaaagtgaaattgataatactgatatatataaaatgtctaatccgggatatccatccatatatatatacaacactgaaggataa

SEQ ID NO: 153 - DNA, 1938 bp, Plasmodium falciparum
attgatgatgaaggtatagagaatttaatcttattaaggtcatcgttttttaccatcctagtatgttatttaagaaataatttaataaagatgaataaaatatataccaaaacaaaagaatcgaaaaagttaaataaacatttcaataattatttagaagaaattgatgatgttttatatttttttgaagatatgcttaattgcgaaaaaaaaagaatcaatgatatgttaatagtaaagcttattatttatttttattttccaataattggttcttttcataacgccatatattttcatggagttcatcctgaaagcgatagtaacatttgtaatcatgcggagaaacgagaagaacaaaatatgttcaagaaggatattaatagtaatgatataaacgaggagcaacttaattatggtagtcttgattatgtatatttttcaagcaatggaaaagatggtacttcaaaagaagttcatatgaatcatgcaaaaaaaaatgacacaaataatgtgaataaacaaaatgaagaggacaaaaataatttggaagataaaaatgatttggaagataaaaatgatttggaagataaaaatgatatggaagataaaaataatatggaagataaaaatgatatggaagataaaaataatatggaagataaaaatgatatggaagataaaaatgatatggaaaataaaaataatttggatggtaaaaacaaattggatgataaaaaaaaagatcaaaaacaaaaaaatatgtataagaatgaaaaagttccaacagattcacataacgaaaaaaaaaagaaagaagttgctttcaaattaaacgaacaaaatgataatgatatgatggattatcaaaataataaaaattcaaaagatgatgatagtaataatattaataataaagacgaaaaagataaaaatgatataatttatactaatcctgaaatatctttagagaaaattcaactgttcaattcatataatattccctttttacgattagttgataataattttagaaattgtaaaaattatgatttctgtaaaagtttatcttcatcaaatgaatcttctatgaattctaacataagctacattgaaagagagaaggatgaagatttgttttttaatgaagaaaatataacgaaaactgaacctttaataaatgaagatgataatactataaataaaaatgactctaacaaaaagaatgaaagtaataacaaaaaaaaagagaaaaaaagtgaaaatgcttatgaatttttgtactttaaaggaagattaaatgttaggagacaaaaggatactgataaaaataaaacagaagcaaataaaaaaaaggtcgacaatgaaacaaacactgtaaaaaataataatatgattgatcaatataatagtgattctaattttataaaagaaaatgatttaaaagattattattttaaaaaaagagaaaaaaaaaatatattcattcaattaaattcacgaaatggaatattacataaaaaaaaaaaaataaataataataataataataataataataatacacaattgaacaataattcctttaataataatgaagaattttgtgatataaataattttataaataataaagaatttttaaaagatattaaacaaaataatttatatgattcatgttatgtagaaataccaaccctccaaaaaaaaattacttttgatgaaaatattaataatgatatatataattatttatttaattttaattgttttacattaaatgtattaaatttctataaccataatattagtgttacaaatgttttctacaatatttttaaagtaggcttatgtcttcatccattgtgctacgtaaactcctttaaaaatttctctttattgtataattatcttataaatacgaacctttctttattt

SEQ ID NO: 154 - DNA, 1932 bp, Plasmodium falciparum
aaaaatttctctttattgtataattatcttataaatacgaacctttctttatttatacttatcagatcattgaatatacttaaaaatgataaaattaataaaatcatatattcactaatttttggggaacagattaatgaatgctttttacataaaattttatcaaatgaattaaaggatccttatttttatgcatatttttttgatgcacataaaaaaatgaatatcaataaaaatacaaatgatgatatggaatttgaagatatttacacatcttccataaattacttattacctgaatataacaaggaagaagaagcttcctatttaaatctaattaataaatattataagaatatggttacaaaaatattaccttgttccaaagaaaatggtaaaggagaacaaggcgaaaaggaagacaaaagaattgttagtgaggaaaagaaggaaattgaagaaaataaagaaaattgttcgattatccaagaaaaggagattaacaagacgggtgatgaagataaggagattaacaagacgggtgatgaagataaggagattaacaagacaggtgatgaagataaggagattaacaagacagatgatgaaaataagaagattaacaagacagacgataaagataagaagattaacaagacagattttgaagaaaaggatattagcaagacagattctgaagaaaaggatattaacaagacagattctgaagaaaaggatattaacaagatagattctgaagaaaaggatattaacaagacagattctgaagaaaaagatattaacaagacagattctgaagataaggagattaacaagacaggtgatgaagataaggagattaacaagacagatgatgaagaaaaggatattaacaagacagattctgaagaaaaagatattaacaagacagattctgaagataaggagattaacaagacggaagatgaagaaaaggaaattaacaagacagattctgaagataaggatattaacaagacaggtgatgaagaaaaggatattaacaagacagattctgaagaaaaagatattaacaagacagaagatgaagaaaaggagataaacaagaatgataataaggataatcataataaagaaaaagttgatgaagataaggatattaacaagactgatgataaggataatcataataaggataaagttgatgaagataaacagattaacagtactgatgataaagataagaagaataatagtacttgtcaggaacaaaaagaaaaagaaacagttgttaaaaaaggaaaacaagatgaaccaagtgttcataaagaaaaggagttgaaagatcaagaaaataaagaacatgttaacgaaaaggataataaaaaaaaggatatattggatcaaaattttaaagagaaagatataaatgaagaagcaactgtgatagaagaagaaaacaaacaaactaagataaattgtatgaaagaaaatgagaatattggtgatatagaaaaaaatttaacaagtaataacataatgaaatataacgaattaagtaacccaatattacttaatttcatgttacttactaatatacaaaaagagaaaaatattaaaaaatgtgaaaaagataatattaaaaataaaatatcagatatatatttattgttaagtatccagtttatttataattatttaaatacatcagatgatgatttgaataatatgaacatttctttttttaaagtgtctaattacaatttcttatatatttattggaacattataaatgtccatataaataatttatatttacgaattattacattgaaattgttagttaatttgacattattgtatgttcagaaaataaaggataaaagtgtgtgtaccgaatttgtaacaccattattatcattagtggaaaag

SEQ ID NO: 155 - DNA, 2085 bp, Plasmodium falciparum
atgggtcccgcgcctaggacagcaaccactacatacagtagtgccaaggaccttttggaagacattggagaaagtgtgcagaaagaagcaaaaaagcaagctcttggacgtagtgagagtgttttgcatggcttgttgtcaaatgcaacaattaaaggtgtgaaaaacaaagccacaaaaccaatccaacttgaatatgaatatcacactaacgttaccggtggttttgataaaaataatccttgcgcaaataggttggacgtccgattttccgatatatatggaggtcaatgtactgataataaaataaatggaaatgatgatgaaactggtggaacgtgtgctccattaaggaggttatttctatgtgatcagcatttgtcgcacatgaaggaaggtaatattaataacacagataatttattattagaggtgtctcttgcagcaaaatatgaaggagattcaataattaataactatcctgataaccgtgacaaaaaagaaggaatttgtacagcattggcacgaagttttgctgatataggtgacattatcagaggaaaagatctgtttcttggttataccaaaaaagatgaaaaagaaaaagaaaaagtacagaaaaatttaaaaagaatattcaatgaaatatataaaaaaatgcaagatcctgcaaaatctcattatagtggtgattcttcagatttttataaactaagagaagattggtgggcacttaatagaaaagaggtatggaaagctatcacatgtaaagcaaaaaatgatgctgaatattttagaaaaaaagattctgatggaaaacattgctctgttcaaaattgcaaatgcgttgatggagatcctcctacaaatctagactacgttcctcaacatttacgttggtttgatgaatggagcgaagaattttgtagaaaaagaaaagatcaattaaaaatttctttagagaaatgtcgtggaaaaaataaagataaatattgtagtcttaatggatgcaactgtaaaacaactgttagaggaaaaaaaaaattcgattatcaacaagaatgtaatgactgtttggttgcatgtgatcctttcgtacattggatagataacgaaaaactagaatttttaaaacaaaaaaaaaaatataaaaatgaaataaaagaaagagaacctacaaaaaaaacatcacatggaactatcaataatatgtatgccaaagagttttatgaaacactggaaaaggaacatagaactgtcgatacatttttaaaattattaaatgaagaaaaagaatgtaaaaatcaccctgaagtaggagagggaaaaaaaacttttattgactttaatgataatatcgaaacattttctcatacaaaaatttgcgaaccttgcccttggtgtggagtgaaaccgggcggtccaccatggaaagataacgacattgattcatgcgggaaaaaagaaatatcgtttagcgataaagatactactgatatatcaatactttccactgatagagcaaaaaaaaatattttacaaaaattagaaaatttttgcagagatactgagcatattaatcatgatatttggaaatgtcattatgagaatactgataatgataattgcatactacaaaatgagaacacgggctcagaaaaacaaaaaattatgccctttgatgcattttttttcctttggctaacacaaatgttagatgattctatagaatggagaaaaaaacttaaaacctgtataaataatgaaaaaccaactaattgtatacggggttgtaaaaagccctgcgaatgttttgaaagatgggttgaacaaaaagaagaagaatggatttcaattgaaaaacattttgacaaacaaagagatatatcagaagaagaacgttatataacacttgaatatattttgaatgaattttttatggataaaattgaaaaagcttatggaatagaaaaatcaaaagaattaaaggagaaattaaaatcaaataaaggtcacggaattataagagatacagaacattcacaggatgcaataaaaatattgctagaacatgaattagaagat

SEQ ID NO: 156 - DNA, 2079 bp, Plasmodium falciparum
ggagactatagagatatatgcataggtgatgaaaacgtgattaagacgttaaaatatagtggtgataaagacgacattatggagaaaatacaagagaaaataaaggctgtttttccaactagtggcggcacatctcacatacctgatgtcaaacctggtggcgccctatcgcgcggcgactggtgggaacaacatggtaaagatatatggcatggaatgatttgcgctttaacctataaagagacaagtggtagtggcgaaaagggtgaaaaaacaactattacccaggatggtactctgaaagatgcacttttggataccgacggcaaaaagccaaaacgtgactaccaatacacaagtgtcacacttaaagaagatgatagtggagaaaaagccgccaatgtcccggccaaagtggaacccactacactggccgacttcacgcgccgcccagcgtacttccgctggctggaagagtggggcgacggcttctgtcgagagaggaaaaaacgattggcacaaattaaaaaagattgctacgaagacggtggaacaggtgaaaaacaatacagcggttatggggaagcgtgtgatcgaacaaatacatcaaatgaaggagcttctgctgatttagaaggtccaagttgtgcaaattcttgtagttcttatagaaaatggatagaaagaaaaaaatacgaatttaaaaaacaagaaaaggcatatggtggacaaaaacaaaactgcaaaaaggaacgtaaagctgctgaaagtaatgataatgataaacaattttgcggaacaccagaaacaacatgcaatacagctgaagcatttttacaaaatttaggatcatgtaaaaagtataatggagagggtaaaaaaatttttgagaatacagaggaaacatttaaacctgcaatcgattgcgaaccatgttctgaatttaaagttaaattagaaaagtgtaattgcgggagtgatgctaaaggaaatacttgcacaacaggaaagattacggcagaaaattttgaaaataagacagatgttaatgaagttgttatgcgtgttagtgataacgctgaaagtggttttaaaggtgatttaaagagttcttgtgaaaacgcacatatttttgaaggtattaaagaaaataaatggaaatgtcgtaatgtatgtggttatattgtatgtaaactggaagaagtcaatggggaaaaagataatggtaaaaaaattttattaattagagcattggttacacattgggtagataattttttacaagattataataaaattaaaaaaaaattaaacacatgtatgaatagtagtgatgcaaccccatgtataaagggatgcgtagataaatggataaagctgaaaaaggatgaatgggaagaaataaaaaaaccttaccttgaacaatataaaaatggctatggagaaaattacaatgtgaaaactattttggagaaatttcaagatcaacctgaatttaaaaaagctataggaccttgtccaactttagatgctttcgagaagtcaaaacaatgtaatgcaactgcgagctcagaaaagggtaaagatggtaacaaaagttatgttatagattgtttgcttcaagagcttgaaaagcttcaagaaaaagcaaaaaagtgtcatgaccaacatagcgacaatccacaagaaaaatgtgatgatccccaccctgacgaacccgatgaggaggacttactccttgaagaagaagaaaatacggcaaatagtgcgccagaaatttgtaaagatgtgataaaagcaccaccaaaacaagaggaaaaaggcggttgtgaaccagcatcccctcttgaacccgaagaagtggaagaagaaacagctagtgtcccacctggatcagaacctgaagctgataaaggcccagtcaaacccgcagaactaccaaaaccaccaaaacgaaacaaaaggcaaccgaaaaaactatatttcccaactcccgcactacaaaatgcgatgttatccaataccattatgtggactattggaattggttttgctgcaatcagttacttttttctaaag

SEQ ID NO: 157 - DNA, 1044 bp, Plasmodium falciparum
aaaaaaaccaaatctactattgatcttttgcgtgtcattaatatccccaaaggagattatggaatacctacaatgaaatcaaaaaatcgatacgtcccttacaaaagtggtcaatataatggcaaaaaatatatttatatggagggggatgaatcggatgactacacatatattggagatatatcatcatctgatattacttcgtcagaaagcgagtatgaagatattgatataaataatatatatccatataaatcacccaaatacaaaactttgattgacgtggtactagaaccatcaaaaagagatacgtttaatacacaaagtgatataccaagtgacacatctacgaataaatttacagataatgaatggaatcaactgaaacaggattttatttcaaatatttcacaaaattctcaaatggatttacccaaaaataatataagtgggaatattcaaatggatacccatcctcatgttaatattttagacgatagtatgcaagaaaaaccttttattacatctattcatgatagagatttacataatggtgaagaagttacctataatattaatttggatgatcacaaaaatatgaatttttcaactaatcatgataatataccaccaaaaaatgatcaaaatgatttatatactggtatagatttgattaatgattcgataagtggtaaccataatgttaatatttatgatgaattgttaaaaagaaaagaaaacgaattatttggaacaaatcatacaaaacatacaacaacaaatattgttgccaaacaaacacataatgaccctatagtcaatcaaataaatttgttccataaatggttagatagacatagaaatatgtgcgaacagtgggataaaaataaaaaggaggaattgttagataaattgaatgaagaatggaataaagaaaataaaaataatagtaatgtcacagacacaaatggtgaaaataatattacaagggtgttgaatagtgatgtttctatccaaatagatatgaattctaaacctatttaa

SEQ ID NO: 158 - DNA, 2967 bp, Plasmodium falciparum
atggattatagatttgttttgaagcaacaagagttatatatccatatagatatggataaggaaagaatagaaggaaatacggttatgaacatttctctttatatgcccatttattatttatacgatgaagaagattttattaagaataactataatataaataagcttaaaatacgaaaagaagaaaaagataagaagaaacagatgaaagaaatttttttacaacaagatgtgtgttacaaaaaattttgtgaaatgaaaaaagaaaagaaattatttgtaattcttcaaattccacataatattaattcaagttcgtattacgatatagaattaaataataaggtacatgataaatattacataatatataatagttcacatagtgcttcttcgtatgataaaataaataagaaaactgaagataataatataaatgaagcaaagcatatgaatgtttataacaataatgaaaattatatggtaaaaaaaaatacaaaaaatgtttcttgtaataaagaagaagatgaattaattttacctaataatttaaaagaaaaggatgataaaaatacaacaagttatgaaaatgatgataaaaatacaacaagttatgaaaatgatgacaaaaatacaacaaattatgaaaatgatgataatattatatataataatatgccatatgatgagtatagagaagaatgtatgtccgtagaaagaagggattttgaattacaagatactttgaatattgctgattatgtttctttaaataaatatgtggatgaaaattatatgaaagaaaataattatatgtttataaatatagatcaagaaatattggataaggaaaaagataagaattataaaaattttcttcatttttgtaataatgatagatatgtaattacaaatacaaatgaatataatataaaaataaattttattataggtttgaaattttccttttataatttaaattcatattataataaaacatattttaataaaaaaaatgaacataatttacttattactttacaaaattattcaaaagaaaatacatggtttccaacactctcaaaattcgatagtatatattcaaaatgttcatggctaaccatgtttaaaattcataaaccttattttattatttcatccaatactttaataggtatatacgaagaaaaatatgaacatgaatatgtaaataaagatgaaaggtacggtgaaacaattaataaaaaagaactcgaaaggaattgctttgtttataaaacaacaaataaatatgcaaaattattccctcatcaaatttgcgtttttgcaggaacattcgattttctacacttaaataatttaaattttaaaggattcgaaaaaattaattatgattttttgtacaaatatgaaaatatgtacaaaaataacaaaatgtataattccattgaacaatataataaatataaatataaaaattttaattataaaaataaatataatttattcaaaggagaaaaaaaaaaaaaccaaaatggctattttgttagaaatgacctgaacggttcaggcaaaagaaaacgtacaaattcgcaacatttgtattatgaagattcggatagtttgaatgaggacgataatatgggtagtcgaatgaatgtcgctctaaagaatgatattaataataatgaaaataatgataataataataatgaaaataatgataataataataatgaaaataatgataataataataatgaaaataatgataataataatgaaaataatgatgataataattacaataattacaataataatgaaccttttgaagacaatttgtcaaatgatgaaaaatatagtcaagtaaaaaaaaggaaaacagatatgagctccttctctttaataaccaagaagagttatgacaaccaaaatgaaggaatgtgtaattatataaaaaggaatgattataaaaagaaaatagaatcttttataaatatggaaagacaaaaatgcaataatataaaatataagaatttgtttgaacataataaaaaagaagtcgatgctgatgatgaaataacatatcattatcaaaagataaatgataagcgtgttcctaacatctatatattttctgtaaaggattataaaaatgaattaatatatacaaatcttcatattggatatattttaaggaattttttagatattagtaaggaagattttccttatgataatttaataatattatatcttcctattgaattttgtgaattaccaagttttttttataattcagaaaatatagaaagttcttttagctgtcatatatatgatgatataaagaatggatataatttattttcaaatagtaatatattaaattataaaattattgaaccatatatatatatgaaaaataataagttctttatatttggaaatgtacttattttccctacaagcatattacataatatatatgatgttttatttaatatgaatatttttagttataaaataataatagcagaagggttattatctttatgtcttcaaaactatacagatactatgaaaaatgaaaatatttatttcttgtatatgcttaaaagttttatgttacaaaaatttattgaaaccatgtttggaaatgtggaaataaatgttatcttttatgaattacgtgaacgttattgttcgctagttgaacttttaggagatattaatttatttcattcttatgaagaaaataaaaataatatatcacaagaatttcctagtcattatatatttaataatttattctatctgaaatgctttttatgtgtacgcatctttttcaacatacttaaaaatttccctttttgtaatactattcatcaatattgtttttttcttttctttaattattttaaaagcaagggaaaggttatacaatcaacaaagttttggaaaaag

SEQ ID NO: 159 - DNA, 1566 bp, Plasmodium falciparum
aatatcttgtataaattgtttttaaaaaaaaaaaaaaaaattcaaaacattaaatatggacacaatcaaaattgtacgtctattccattagaaaacttatatcaattcttaggaaacaaaataagtatgaaacaaaattatgagaaaaaacattttgtaaataatgaaagcaacaacaaaaatatatctataaataattctcaaaatacaaaaggtagtaatattccaaacacaaatcaaataaaaaatatgtttaataatattaatgtagtaaataataaaagtgtatatatggataatgtcttaaatacaaacatagagaaaggaaatataaaaaataaaaattctcacactaatgttggtaataataattatgatgttaattatgatcaatcattttctcaacagaataaagaacaagaatataacaacacaaaaatgttattagaaacaaagaatggaaataaatcttctagtgaacaagaagattatgaaaaatattcttattcaaataatataagttcatatcaaaatttttattattatgatgatgacgattatccatattatccatttgaaataaaaattaacgaaagcgatgttgcagaaacatgttatgaaacagatattatatcaaaccattcgtctaatgaactaaataacgagaaatgtacaaatatgggaaataattcattttgtgatgaagatatagaacatgttatcaacagtcatcatgaacaaacaaataatacaacatcatccctaggaagtagtagtagtgatatagatatgatgaaaactacaactactaatataaaagaaaaaaatatatatataaataataataataattattattatgactattattacaatatgtatgacgatgttgtatcctccagtgctgatgaaaagacaaaatgtgagatattagaaaaaaataataaatcattttttaaaaaaattagaaaccatttaaatatttttcattttaacaataaaacgatctacgataatgataataattctcttatagatttcataaaaagggttcaaaaaaaaataaataaatataatatatgtaaatgggatatagaatatattttaaaagtaattaaaaaaattgaacgatttttcattacaattgaattagaaccaaacatgacaaatgattattttcatatgtactattttgatatacatgaagaaaaaaaaaaaaaaaaaaaaattaaagaaagttatgatgataataatgtaaaggataaatataatgaacaaaatattatatataataaaaaaatgaaaaataaaaaatatgtcacaaataatcaaatgaaagaatatttatacatgtctttattttcaaacgataattatttttctcttgttcatttattaaatattcaagactattataccatttgtctatatataaaaaaaataatacttattaattccataagcgttaaaaaaaaaattaatatctttaatattatcttatggaccatatataattttatgaataacaagaaaactattatgatggaatacaaaaaagataataat

SEQ ID NO: 160 - DNA, 2289 bp, Plasmodium falciparum
tattactttacttgtaattattccgtgataaaatctaataaagaaaatatcttattacataatagtagtgtacataaaaaacacaaagacaagaatgttaaagatataaaaaaggaaacaaatgatattactatttttacatcagcagatattaattcatttattaaaacattgttaattataataaattatgacattcataaatttaaggatacagaatatcataaaacaattgaacaagttattaaagataatgattggtatgttatatataataataataataacaataataataataataataataataataataacacctcgtcccttttaacctcctcctcctcatcatcatattattataataaggatgaaactagaaatatgagctttctatataatgatgcttttagttcaaatttggattctttttcagatagtataccttcaacagaatgcagcgatttagaatttggagatatattaaacgaatgtaataataatatgaaaaaaaataataataaaaatgaagaaaaatataaagataagcaaatatcatttatgaatatttttagccctaatgaatggaagtataatatatatgatatggatgaaatgtataatgataaaaaaaaaaaaaaagatgtacaagcagattatatagaaaatgtaaaaaggatacaaaatgaagaccttataaaacatccaaataatacatctataggaatggtaaaggaggtagaaatttttaataaagatatgaatgataaaatagataatataaataatgaaaaatatatatcatataataatagttcttattataatgaagaacatgaaaaacataaaaatacaaataatgataatcttatattacaagaagatataaataataaggaaggggaaaaaaaaataaataatgataaagatatgtataataatgataaagatatgtataataatgataaagatatgtattataatgaatatgatgatgaagattatcaaatgcacatttcaaaatcaaaagatattattttaaataaatatggagaaggatttttatcaaattttataaacaaattgaattatcataataataacaaaagtaacaataattataataataataataatgagtgtaataataataattatcataacgacagttattgtaaaaaacattttagacatatacataaaaaatcacaaatgataaatttattaaaatatgtcaagtttattttaaaatattggaatatatataatttaattaatgaaaagaatttagaagaatatttgttaatattattttttgctaatcattttaattttttccaaaatatgataaagtataaaattatattaaaactatttattcataataatttacaaaaagcagatgaactcttaggaaataaaagtatggtttggaattggtacagaaatactggaaagattaaaacaaatattgaagaatatttaatcaaagatatttcttgtaaacttttttttactaataataaacaagatcaacttttaaaaaaattaaataaatttcaatataaaaataaatatgatcaaaataatttttttttaaaaaattattatcataataaatataatcataattatatttcaagtgtatatattcaatatcttcatttcctaaaatataaaaacactcataaaaataattattccaaaaatcaaaggacaaaagaatatgatattattataaacaacaaaaaaacggaagaaaatgtaaataattataatcactccataaatataaatcaaactgaaataaataataacaaatatgttaatcatcataaatattttactcacaataatataactcaagataatagttatattaataataataataatagtgaatcttatgaaaaaaaaagacaaacaacagattatattcctcaagatgaatataatcaactaccattgtttttcttaagcttattagacctttataaaaatacttttgatgtctacgaattttattatcaatccgttatttataaattattgaaaaataataatgaacataatattaatgaaattcaaaattatgttgaagacatgaacaaatatctaaaaaataaattagcgtcctatgatttatatatgatgttatattattatcaattttttacctttcaatctatttgtaatcctaaccaaaacgttctcaataaaaatgaacaaaacttaattgtatatatgtgggtaaagcatacgcagggacttttaaaaaaatacagg

SEQ ID NO: 161 - DNA, 1074 bp, Plasmodium falciparum
ggcataagacaaatacatattatcacacacagcatgggaacaaggatgttcctactagcctttcatgatatcgtaagtagcgaattattttcgacgattgaagaaaaggaaaaagatgaaaagtatcaaaacaaaatgaagctaataaccctaactatgatgaaccctgagtattatttaagcgatttcgtaaataaagaatatatatttcttcgctcattttgtacagtgatttcaatatattgtgattctaatgataaagctttaaaatgggcagaaatttttagtggtactaaatccttaggaaaaaatgtgtttgatttaaatataagtaaagaagatatttctaaaaaatataatggacgaggtgtaaattatttatttgatagtaaccaattagattattattctatttctatggaaaataacaaaaaaattcctaataaaaagaatatgaacatacaaaagaatacagatgataaaatagattacaacatagatcataatattatatcatcattttttgattgcgaaaatttagaaattacaaataacaaaaaaaaaaataaaaaattcaaattcaaaatcaaaatagcagaaaagttaagaacccttgttcactttttttttggaaaagaatatgtaaaaaacaaaacttatattaatgatcaaaattcattacaaataaatgacaatgacaatgatgatgatgtagatgaagatgactgttctttaaataaaaataaaaaacaaaatattttacatcagccacctatgttcagaaatacattactagtatttactggaatagaacctacttattgttataaagataatcgtgattggctagatgtagatgtcattgatactacttggttaggttcaaatgtacatacattgagacattcttattggtcattaaatagagaaattattgaagatataagagaattgatagttactagaaaaagagcaagacaaagaacatctcgattggatagaagagaagggaatgtatgggtatatcgtgtagcaccttctcatttaaaatcaatatttgattcggacatataa

SEQ ID NO: 162 - DNA, 1434 bp, Plasmodium falciparum
atgaaggtgtggggagcttgcttttttgttgcgttacttgctgggctgatcaaaaaaaaagttgaatgtattgaacttagtgccagcgaaatttcccctcatgaaaacaaatcgacgagttcatcaatattccaagaggaattaaaatttgataagtctctgaaaaattttttcaaacaaaataataagaatgaagatgagatagagagggataatttctttgatgaaaataaaaactttataagaggagaaatattatctgatataaatagtaaattccttgtggatatattaaacaatagtactttgaattttttggaaaacttaaattcagataatgaaggggaaaataaggattaccaaatagaacttgaggaaaattgttcgcccttttattgtgagaaaattatgaaggcaaaggaaattgaacgattggacgatacaagtagctcagaaaatgtaaaaaatgatgataataaaaatatgagtggtgataataataatgataataataataatatgagtggtgataataataataatatgagtggtgataataataataatatgagtggtgataataataataatatgagtggtgatgattatgtagaaggaaaacaaaacataaatagaaatgaaagaaacatagaacgacacaataataatgataataataataataatttggtaaagaatatgaacaacatggaagaattttataataataattatgataacaacactgacgatggtgtagatgctttatatttaagatctgttgatgatggtgaagataaacaaagaattgtccttacagatggaaataatgtatatattttagaagaagttacaaaaaatgaaaataataactcaacaatgaataaggatgaaaataatattaataaaattacaagtgttgaacaagaaattaaaatgcatgtaccatcagaacaaaattataatgaagataatatattagaaagttttatggactatataaatttagaagattcacttttaaataatattgatgatgtaacgaatatacaaactggtagagaaacaaatatacgtccacacaataatacaaatgatcataataataacacaaaagattataataataacacaaacgatgaacaaaataaacaacaatccctttttgatgataatatatttaatctaagtgaagaagaattatcaaaaaaaatttttgatgacatcaaattaaacagtgaagataaaatcgaatgtcataatttttcagataatgaagataaatgtaatagttttaaaaaatgtacttatgtaaatattgataataaggatacatgtttccttgattacaattatatgctcttcttaaaaaataataactgtgccttacaatcaaaatcatctttgttgtctatatcgaaagatttgttaaag

SEQ ID NO: 163 - DNA, 1806 bp, Plasmodium falciparum
atgaataatgtcgcctatgaacccttggtatacctacttttaaattcattaggttttttgctatatcatgagaatataaaaatggatgtccaggatgatcagaaggagttgcaattttttaatgtggataagaaagaatatgaaacattatttgttgaaatatgttttgattacttgaatatattaattaggaataagaaaaataatgagaaggaagattttacaaaatttctgaggaattattttgatatggtgaaatgtaatttatatatgaataaggatattaatttatgtctctataatataaatgtagatatgttttatgttttttttgagagtgatagtaataataacaataataataataacaacaataataacaataataataataataataataataataataataataataataataataataataataataataataataatttgtatgcctttttagaaataaaggataaatatttacatgaacacgattacaataattttatatttttacccttttttgttatttcaataaatgatgacaaaaaatattttacatatgtacatgatgatacatttgatgatacgacgttttgtttttgtattgattcaaatgaagaagatatgattaataaacttaatttggacatacataatgttaagaatagaaaaataaatgataatatacaacataacgatagttatttatgtaaatatatggacagaacaaaaaaaatggttgtaagctttattatttcagaatggaagaatgaaatgaatgttgattatgtggaattatatctttttatatttaatcaactcataagaattcgtgttaataaaatatatgtttctcattttaagaagaagtatatgaaattatgtaatgatgagaaaaaaaaagggggtagtaaaaatcaatatgacgataattttgttgttaatagtgtggatgttaatagtgtggatgttaatagtgtggatgttaatagtgtggatgttaatagtgtgtatgatagttcatatgaggaaaacactcatggtattaataataataataataataataataataataataatagtaataataatagtaataataaaaattatagtaataatagtcataatataaattataagaaagaaataaaacagattgatgacaaatgctcttttggacatgtcctaaacacatttaacaaatatgatataaataatgcggaagaaaaaaaaatcttcccaataaaaaatacgaattccttaagaaaaaataaaattgattattataaattaaaggatggaatatatataaataaatatgagaataaaataatatacaataaggataaatatttatacaaaaagtcattgttgaaatatgttaattattatatatatacaagaaatgataaattatatttgaatgagtataatatatcttatatatttattaagtattcaacatatattgagaattttgagttaaacttttcttttgtgatagatgacatggatcatgtggacttttatttattgagcaatgaaaacaatgtcataagtatccataaaattaaaaacagacagaacatatccttaagaggaaggaaaggtatgtataaatggtacaataatcatgctgataatattgttttaaataatgataaaaaggtaaaggaaaaagaaaaaaaagaaaattatatttacatagacgatggtaacgaaacagaggataattcaaattctaatagtagtctaagtagtgataccgaagaatataattcttatagtgatgat

SEQ ID NO: 164 - DNA, 2124 bp, Plasmodium falciparum
aataataataatgatgatgatcataataatgataattataatgataattataatgataatatttttcactgctatgaaaaaaaaaaaaaaaataatagacacacatccatatttcgtcaaaataataaaaagttaccacatgttattccattatctctacttttctacaattttaatgaaaaatattttatggaaaaaaataaagtcgatcaatctaatagtactattttatatatacataaaaaaaacaaaataaaaaaaatatgtatcctggatcatttgaagaagctaaataaaaaatgtaaatttattaattatatatcgtacaatgatatagaatatgataataagtacataagtaagaaaaaaaaaaaaaaaattatattaaatgaaggatataataatgaaataaataaaaaatccaaaaaccattcttccatgataaatacaagtaataaaacaattgtaagtagcgatatacataatacatctaacattttaccacaatttattttccaaaatagagaatcacaagcagatgcacatatagaacccaaaaatgaaaacattcaaaatggaaaaccacacattcttcaattacaaaaaaggtctttaggttcagatagtatatatgatgaaaatggaaatataaatgaacaaaattttaatgtaagtaataccatagaagaagaaggagaaggagaaggagaagaagaagaagaaggagaaggaaataatcaaaataggaatgatcataataatgatgctagattaaatcatgaacaaaatgatttagtaaaagaggagaaagaaaatatgaacaaaataatgatacataataataacaaaaataatcataacaaaaaaaatcaaaaagtttttctagatattaatatgaataaattattatatatatataaatgcatgcacatacaatgtatgcataacctaacacctttatgttccttcctaaatacatttgtacctaatgattatagtataaccaatttttttcataatacatataacaattattttgtgaataatatatttttccataattttttttacacatatgataatagtttaacattattattgaattctaataatatgaattcgttacattatcataatgatataatatcccatgtggattatggaaacgagcacgacgtttataagaataatagttatgcaccaggtgggttcaaaagcgcaggcgcagatgaaaatttaagaaaaaagtcgtctaagggaagaaataaaaataaaataaataatcatatggatgataattacaataatggggccaatatttacaataatggggacaatatttacaataatggggacaatatttacaataatggggacaatatttacaataattttgatttgtctagtggatatgaaaaaaaagaacattttaataatttacatactgataaagaaaaatacgagatagaaaaaagcaaaaatataaaaagtgtaggaataaataataaatataataataacatgaatgcatatgatgaaataaaaaacaatttgattatctccaagacagctgaaaaatatatggaaatgttactattattattatataataacatgcgtttatatgataaagataaaataaatgatacaaataatacgaagaagaatgaatttagatatttttttgaatatatagataaaaatataaatagttgtataagaaaaaaatataattttataaatcagttatcagatgaacaacgaaatatatctttttttaaaacaggtggaataatatctcatccatttttacccttctttgcattaatacatataaataataacgaaaaaaatatgaatgaacaaattatagataaagaaaaatttcaaattaaattttgtagattcacagataattatgatgatatatcttataaatatggaagtattacaagtatgacatggaatgattctggtaatttattaatggtttctgatgacgaagggtatttatatatatataatattttcttaggaaattttatatggaccaaaaccaaagaacgagctttatacaaaaagaacctgaccagttcatcaaaaaatgcatcgaaagaaacaaaa

SEQ ID NO: 165 - DNA, 2121 bp, Plasmodium falciparum
ttatacaaaaagaacctgaccagttcatcaaaaaatgcatcgaaagaaacaaaaaataaggatataccgaatgttaccaatgataatacttgtagtgttaaatgtgtaagtgattatcgtcaagaagaaaaagaacgtggacaacattataaaggtaggaaggatgatcaagagacttatgaggaggaatatgatgaagaaagtgaacaggatgattattacgatgatgattattatgatgacgattattacgatgatgattattatgatgatgattattatgatgacaattcctataatgacaattcctatgatgacaattcctatgatgacaattcctatgatgatgaaaaaaaaatgaataaaaaatcacttccttacaacaaaacacaaaagagataccaaagaaaggacaagaataacaaacttcgaaatttttttaaagagaacatattaaaaaagaaaaaaaagtatatgatggaaaaagagacgaaagatatgatatatatgaaaaatatgagaaagttacatattatgagaataaaaagaagaagaaaaaaattaaataaaaaaaaaggatatattataaaagaagctatgtgtgtaataaaattacatgatcaaattattgatattaaatatttaaatgataataacttttatataatatctattggaaaaggtgttaataaaaagtgtttaaacaataacactgtctttataaattcgtattttatgaaaagtcaagaaaatcatatgaacaaggaaaaaaccgaaacaccaagaaactgtaatatatataaggaaaatatgatgaatatgaaatcttttatggatgataataaatattcaaacaatatgatgagtagtccttatatacaatatgttaataatttaacaatatcaaataataataataataataatgatagtaataataatacagtatatgataaaaaaaaacaaaaagatgatcaagaagaaaatgaacttcaaaaaattaatgatacaaatacaaatatatatgaagtacaagataaaacacaaaatactcatcatattattcctaccaatttaaataataataataataataataaggagaatataacaattcaaaatgatgagaagatacatcaagttaaaacatcacatgtacataataatagcacaaatgttattcaaggaataaatgaaaaaaatgctatattagacaattttaatataacaaaaaaaaaaaacaaaatgtacacaaccaaaaataatgatactagtaataataataataataataattactataacaataataaccatgttgatacctttttaaatcaacatgttttaaaatcgaaaaaatcctactttaaatcacggtttttttattttgattcatccaatattatacccatgaaattttttaaaaaaaataaaaaattacaagaacaaaatgatatacttgacaatatatgtatttgtatttgggatatgtgttctatactaaccaatgaagaaaaacaatatttaaaaaataaaaatgtagaaatgaatacaaatgaaaatgtgaataataaaaccgaatcaaaaaaaatgaagaaaaaaaaatcggttatattacatccatcattagtttgtgttattagtaatttatcaaaatattatattaataatgaaaatataaaaaatatgaattcttataataataataataataataatataaatctttataataataataataataataataataataattgtattactagtttttctgtatggacctcaacctttacaaattacatgtacaaatcagtgtgtccttttgaaaaacaaaatagtatgccattaaatgaagtaggaaaaaattctactgaattatctgaacctcctaaaaaaaaaagtatattctggagtttgtttaaaaataaaatacattctgatcatttttcacaagatgcatatattttttatggtgatcaactaggatatattcacttaattcatcttcaactacatagagagatttactgctttaagccttttgattttccaatttttaaaatatttataactaccaatatgtgtacgaagttattgatattggcagaggacagg

SEQ ID NO: 166 - DNA, 648 bp, Plasmodium falciparum
ctgaaaatttacgaaatcctcccggggcttcaagtggttttcatcaaagaaatcgaaataaaacatgatgtaagccccaagaaatgcatatgtgaagaaaaaattcatgaactaaaagaaagaaggaaaaaagaagaacatgaaaatgaaggaatttctatttttaacctctcttattttttatcatcaaattatcataaaaaacaaagtaatacaagaagtgatgaaaaaatgaattcatcatataattattcatataatcgtatgccatctgataataacaaaagtaataatttattaaatggatcagcacaaaatgttaatacaaacgattcgaaaaaaacagtacaattatattctttccaaaaaaatgataagaaaaaagaaaaaaacacaaactcttcttttaattcaatatctcatttaaaaagtccaagtgaaaatagtgaagaaatggatattcatagtgataaagaaggatatcaaagtgttattataggaggaatcaattttggatatttaggatttaacttttccaagtttatgaataataaaaaaaaaataacaataattgatgcatatttgttatctacaacacatttagtaaccatatcgaataatggaaccattgccctcataaaaatatga

SEQ ID NO: 167 - DNA, 1548 bp, Plasmodium falciparum
atgagcaagctgtgtattaatgagtgtattccgtacgttcagaaatatgaatggggtaaaggaaaagatggactggtttatgaagtgatgaaaaatatagtgcaagataatcatgatattataaaaaaagaaatagatcatttggagtatttgagagaatatatggatgagtatgatgataataaagatgatgaggaagacgtggaaaaagatgatggtgtaaataataatgatgaggaaaaaaatgggaaagacaagaaaaaaaaaaataaagaaaaaaaaaataatgaaaaggatggaatggataatgatataaataatgtgtcaaaaaatataagggataataataaaagtaatgatgatgataataataaaaataataataataatgataaatatgctgagctttggattggtaatcatgataaaagtcctaatttagttgtatataaaaatagtttggtaaaaattgaagaatttttaaaaatatatcaaaaaaaaaaaaataagaaaagtaaacttatgaaatttttttataaaaaagtagaaaacacgaaaaataaatatatgaataaaaaaaagttttcaacaaaatcagaagatattattaataagaataataatactactaaaggtagtacattaggtggagaaaatgatttgaaaagatattcagatattgaatttgcttctttaaataatgatagtacaaaagaaaaagaagatatgaatgaacaagaacaattattagaagaagaagaagtggataagaataccttatttccatatttatttaagatgttatcaatatcaaaacctttaagtattcaaatacatccaaatgaacagcaaacattatatttgaatacaatgaatcctcttttatataaagataaaatttttaaaacagaaatgtgtgtttgtattaattcaatgactcttttgtgtggttttatgaacatttttaaaatagcatttcttataagaaatattaaagaattgaatgatttttttttgaaaagaggtcaccagcttaaccaaaattgtgatagcacacatcaaaagaaagcggatgagcttaagtttgataagaagggtccaaatgaaattgttttgaaggatgatacgaattataataagaaagataacacgaacggtatcacaaaggatacattggatgataacaaggaaaaaaagcacaccgacgataacatcagtaaaaataaccataaaaataataacaataataataataacaataataataacaaaagtaataacaataataataacaagaacaataacaagaacaataatataaataaagaaaacaaagtagagagtggtgttgaacttgccttaataacccagttgttgtcatcttcgccatctgcttcttcctcatgtggaaatataaatatagattcaggaaaagatgagaaaaaagatatgttttatttatttgatttgttttattctagcaaggatgatcatgtggaagaagtattatccatgttatcaagaatatacatttatattataaactat

SEQ ID NO: 168 - DNA, 1542 bp, Plasmodium falciparum
gtggaagaagtattatccatgttatcaagaatatacatttatattataaactatgctttaaaaagaggtaatggattgagttatgatgttatatctgttattgataattatgcagaatgtatacaaaagtatgtttatgatgagaatttttattcttccttttataagaatgagaaatttttagaacttaatattaacctaggaaatcttattaaagtcgaaaaagaaaaattacaaaatagcttgagtgaaaataaatttaatacagatcttaccgaatctgatatggatgaagtagatgaagatgaaaaagatgagaaaaccataagtgatgatggtgttgtggattcatatgatgtgtcaaaaaaaaaagataaaaaaaaagtatcactagaatatgaaaaagggatggataataacaatgatcaattggataagcaaaaaaaaaaaacatcaaagggaaccaccaccactaccaccacaaacaacaataacaacaacaataataataataataataatagttgtagtagtagtaatagtagtgctatgataaaaggaattcattgtgaatatgataaaaaaaaaactgatgatgacggtacaaaggtgtgcgaaaaagaatgtgcaacgggatgctcaaacgaatatactaatgtatatgataatttgaacaaacaaaatgatccatattttataagtagaaaaaaaatcaaagctttttatgaacacatgtataaattcttaatatatcgtattctattagtagaaaatgataccttaaatgaatgtgttacttctataatagaaaaaaatgaaaaatatcaatcttttataaatgatgatgagacttttaagaagaaaacagagaaattatatgctgatatatgtaagaaaaagaattatgaaaacctatgtaaagaaacggaaaattttattatccatagtatttttgaacttttaaaaaatgtatcaatgtattatgctaatgatggaggaagaattttcctttttattttacaacttattaatttaaacgatggagatgttgtatatataaaacccggtgttatccattcctatatttctggtcattgtttagagtgtatgacaaattctgatcttgttatcagaggtggattaacaaataaagaaatcgacaaattaaattttattaaatatgttaattataaaaataattatcctattattttagaaaaagaatttattaattataatattatgtcttatagttatcacagaatgaaacatttcaaaattttatgtattaccatcagaccaggagaagtcattaattacgttttttcagaaaaaagtttcacttcatgtatagtactttcaaccaacagaaaagttaaaatcaaaggaaagaaaaatgataaaaaaaaagcaagtattaaaaatgtacgaaaaggtatgatactctttatagcccccagtgttatggtaactatatctaatttgtatgccaatccagaagatggaaataaggagtttgtgatatattgtgcaacttcataa

SEQ ID NO: 169 - DNA, 1110 bp, Plasmodium falciparum
gaaaatattgagagcctcttcattctgtgtcttttatatttgaacatacataaatataaagagagtttaaaattagctaactatattataaacattttacaaaaaagaaaagaaaatgaagaagaaataaaaaataaagtacaagataaagtacaagataatgtagaggataacgtagaggataacgtagaggataacgtagaagataaaatagaagaaaagttaaaagaaaaagaagaggaagaccatttaaatataaataatttatatatatacagtactttgcataataatcatttgaacatatgcgagaatatatgtatatatattaaaagcctttgttatttttttcaacgtaattatatatactattatataaatatgtgtatacttttaaatgaaaatttgaatacattgaaagagtgtatagaaaaaaactccaacttgtatgaagaagaaaaggaaaaatgttttgattccagaaaatgcaataataaagaaagtaaaaaaaaagagaaaaaagatattgaaaaggatcataaggagaaaaaaaaaggttccaagaaaaaaataaaagatgaaaataatgaaatgaaagatatacaaaatgaagaaatggatatgaaaaaaaacgaaatggataagaaaaaagaccaaatggatataaaaaaaaacgaagtggatatacaaaatgaagaaatatctatacaggatgaacaaatatgtaatcaagatgaacaaagtcaaaacacatataacagtgataagaataataataattataacaaaaatgtatatgacaataccaatatttcaagaagaaaggataaaagtaaggaaaattcatcttttaaaaatgtaaaaagcaaatcagaaatttctccttgtcacacagacaattacatattgaattatatcgaaagttcagaaaataaaattccactaaaagataaatatatgttgttatttataatatattgtttaaaatataatattattaatattgttatgttcatatatgaaaatcgaagaaaacttttaactgacatggctattaactctcatttatttcatcatctgactataaaaatatttttctcaataaaagat

SEQ ID NO: 170 - DNA, 624 bp, Plasmodium falciparum
atatatgaatattatcaatacataaatatatatatgtatcataatattatatatatatatatatattttattattattatttattttatttatttttattatttttttaaaatgaaagtttttatttttttcgcttttgttaattttttgtttgttttgaatttattttccccttgtacgtgtaaaaaggattatgggaaggaatgggttaaggataaattaagtttagtaaatttaaaattagagaaatatgataaaaaaaagaaatttgctcttatatcaggagcagctataggagccttagcattaataacacttataggaggtatttatatgactaaaggaagaaaaagttccatatggcataattcagaaataaatgatacactttatgatgttgttcttgaaacagtgaatcaaggaaatacagatgtaaagttggcttttcaaagaggagtaaaactagatgatgctgttcctagtgaggcaacatttaaaaaatatttaaaacaaaatattaaagatcgaaatttaaatttaacatggcaagaagaacgggaattatatagaatgcttccttatattcgctttaatgtcgaaagactagctgtatttcttagatga

SEQ ID NO: 171 - DNA, 2781 bp, Plasmodium falciparum
tatggaataaaatataatgagaaaaatgtatgcaattctacttttataagaattagatatcagaggattttgatacaaacagaagaattgtcaccgacacaagtggacgtacttaggcaaacattaataaaagatttatcaggtggtaggtccatagtaggacaagaaaatttgttaagtaataaactagataacgatcttataacaaaaaaattgatagaaagaggaattttaaaaagtaacataacaggaacgaaggaaataaaaaatgaaggagaaaaaaagaaagaaaaagaggaagttgtagaatatgaagaaattgaagttgaagtggatgaagatgaagatgaagatgaagaagtggaatatgtagaaattgaagtagacgacgacgaagaaatagaatatgaaataattgaagttgaggtggatgatgatgatgatgaagatgtagaatatgaagtaattgaaattgaggtggatgacgatgaagaagtggaactacttgaggataaagaagaaaaaatagaagaagtaaaagaaaataagcaactaaaagttgaatcattggaaaaaaaaccattagaaattaaaacaactccaaaatatccattcgtgacagatgaacaaaaggaaatagatccattaaaaaaaaatgaaataaaatcttacgatccttttaaaagggacacaattaaagcgcaagataatttaaatggaaacgaaagaaaagcatatgatccttttaaaaaggatatggttaaaccagaagataatttaagaaaggaagaaagtaaaacatatgatactttaaaaagaaatgtaacacaaatgcaagataatttaaaaagggaagaaagtaaaacatatgatactttaaaaagaaatgtaacacaaatgcaagataatttaaaaagggaagaaagaaaaccatatgatcctttaaaaagagatgcaacacaaacgcaagataatttaagaagggaagaaggaaaaccatatgatcctttaaaaagagatgtaacaaaagcgcaagataatttaaaaagtgaagaaataaaaatacaagatacatttaaggcagatgctataaaaacacaagatattttaaaaagtgaagaaataaaaatacgagatacatttaaagcagatgctataaaaacacaagataatttaaaaagtgaagaaataaaaatacaagatacatttaaagcagatgctataaaaacacaagatattttaaaaagagaagaaataataatacaagatacatttaaaacagatgttgtaaaagcgcaaggtaatataaaaagggaagaaataataatacaagatgcttttaaaaaagatgaaaggaaatctcaaaatacgtccaaaatggatgaaataacaatacaggataatttagggagagatagaataatagtaaaggatacttttaagaaagaagaaataaaatcgcaagatcatttaaaaagagaagaaataaaacaaaaggatatattaaaagaaaacgaagtaaaaaaaatagatcctttaaaaaaagaggaagccaaaccgaccgatctgctaaagaaagaagaagcgaaaccgaaagatccattaaaaaaagaggaagtaaaaccatcagatactttaaagaaagaagtgaaaccaacaaatactttaaagaaagaagtgaaaccaacaaatactttaaagaaagaagaagccaaaccaacagatttgttaaaggaagaaaggaaaacaaaagatactttaaaaaaagttgcagaacaaaagggaggtttgaccacattagataaaataaaaattaatacagttaaaaataaattcaaaatacgaataccttataaaaattcaaaagttattgaaagcaaaataaatgatattttgaatgcagaatatgaagatgcagatgaagatttaacaaaaaaatatagaatgaaagaacttatgagtttatattttgaggatatggattactttcatcaaagtgatatatataaagttattgaaaaatatagtaaacaaaaagaatattcttctattatgacacctatgtttaaggattttatggaaacacatcgcataagttctaaattaagtaaaactattctggtaacacttggactaattgtcatccttacaataaccttaggaatagtaggcattgccgctggatcttcaatagctactttttctacggctctctatgtaatggttggagtatgtgcatttttatcattgtcatttccaggtttattattttcaagggctaaaagaacaaaagcatttatagaaaaatattttaaaattaaaggcatagaatataacaacacgaatgttaataatataaattcatttcaaggggtagtaaaaaatatatggaataaaaaaaatagcacaaagtttaactcaaatgaaaaaactgtaaatgagaaatcgcaccaaaaaaatataagcggaaaaacacttccaacaaacattacaagtaaggcaccacagaataatgtacaaaacaaaccacgacagaatatacaaaaccaacatgaaaaaaatgtacaaagtaaagcacctcaacaaaatatacaaaatagggcaccacaaaaaaataaacaaaataatactcctgtgcaaaatacaataagtaaatctcaagtacaaaatagagtaaataaatctccagtgcaaaatgattattcaaaacataatggacgaggtcctaaccaaatgaatagacctaatcctaatagacatgtagcacaaccattaagataa

SEQ ID NO: 172 - DNA, 1713 bp, Plasmodium falciparum
aatttaaaatgtaatttttattataataacaacaacttatcaacatacgttataaagcataacagatttttatcagaatatcaatcgaactttcttggtgggggatatagtgcagctttaaaattagtaaatagtaaaaaatccggaacaaatgtaaatacaaagtataattcagaaaataccaatacaaataataatataccagaaagtagtagtacatatacaaatacaaggttagcagcaaataacagtacaactacaagcactacaaaagtaacagataataataaaacaaatattaaattaacaggaaacaatagtacaactataaatacaaattcaacagaaaatactagtgctaccaaaaaagtaaccgaaaatgttattacaaatcaaatattaacaggaaataacaatacaaccacaaatacatccacgacagaacataataataatattaacacaaatacaaattcaacagaaaatactagtgctaccaaaaaagtaaccgaaaatgttattacaaatcaaatattaacaggaaataacaatacaaccacaaatacatccacgacagaacataataataatattaacacaaatacaaattcaacagataatagtaatactaatacaaatttaaccgataatacttctacaactaaaaagttgactgataatataaacacaacacaaaatttaacaacaagtactaatacaactacagtatcaaccgataataataatataaatacaaaacccattgataataataacacagatataaaatcgacagataattataacacaggcacaaaggaaacagataataagaacacagacataaaagcaacagacaataataatattacaacaaccacggataatactaatacaaatgtaatatcaacagataatagtaaaacaaatgtaatatcaacagataatagtaaaacaaatacaatatcaacagataatgataatgcagatacaatattaacagataatgataataatacagatataatattaacagataataataatacagatacaatatcaacagataatgataatgcagatacaaaagcaacagataataataataatacaaatacaaaagcaacagataataataatacaaaaataatatcaccagataataataatacaaaaacaacatcaacagataataataataatacaaatacaaaagcaacagataataataatacaaaaacaatatcaaacgataataataatacaaaaacaatatcaacagataataataatacaaaaacaatatcaaacgataataataatacaaatacaatatcaacagataataataataataatacaaaccaatatgtctttgctaacaattataatgaaacaacttctgatgatgaactaaataaagattcctgtgattattcagaagaaaaagaaaatataaaatcaatgattaacgcttatttagacaagttagatttagaaactgttcgtaaaatacattcagatataagtacatgtattgaaaaaaaaaataatcctaggaatcaaataacacatttaaacaatttaaaaaatatgtataatataattaaatttatagtggttatatatattgcttttaattggagtgaagtaatatataaatatgtaggaaaattaattttagcttttgctttatatatgttaattaattaa

SEQ ID NO: 173 - DNA, 288 bp, Plasmodium falciparum
atgagtcaaccacaaaaacaacaaaacgaagaaggagccgccactgccgccaatacccaagaaaagaaattcaacccaacaagaaacccaagccaatctggtccctatcgtcatcatggaccccaaggaagaacaccatatatgcaactccacaaaaatcaaaataataacatggtaaataaaataagtaattatttaggaattgaaaacaaggagttggttgaatttggtttaaacttattcacatatattatagctatatttcttgccttacaaatatatgattac

SEQ ID NO: 174 - DNA, 2820 bp, Plasmodium falciparum
atggagaagaatacgtacgatatggaaaagaataaatacgatatagaggtttcagaaaacaatcgttttctttttaacaaacaaagagattggcctagaataacttttacctttttagtattcgtgttaggaataaaaaccgttttgtgtatattattatatatgtataataatatattattatttgtggtgtttttaatattatgtgtggtttctttttatggtcttatagttaatacaattaaatctctcgtattatatatattaatattaagcttagtattaacaagtattagcctgtctttttataatatcatatatatagaatatatatctaaagtttttgagcatgcatttctttcgacagtattatattctacgttccctttattggtaatggaattatttgtaagtatagcatatacatgtttaaaaaaaaaaaaaaaaggatatatagaaaagcaactaaaggaattaaaaattgccatagataatacaaatgaagaaaaggacaaaaaaaatgaaggaaaacttttatcattacaaatcgatttagaaaagaatcagctaaacacatgtaataaagaatacaaatattatttaactcattataaaaataaaaaatatatatgcatagaaaaaaaaacagactattctagtgaagatgaaatatatgctaaatatatacaagacaaaagtagcgacaacagctatcaaggatatgataagtcaaaattaattaacacaagtaatattaatatgttaaatgtaaaaacaaataaaaaaaacgtaaatcattccatgtcatcaaatactattcaacaagatttgagttttatacactccagtataaacaaatatgaaaaaaaaaaagaaaaagaaaataaaaattatgacaaaaataagaaaagcagcaatactaatgacaaaagttataacatcactcaaaatgatcctagaaaaaacaatcagaacaaagaatttgttgataataataacaaaagaaacgatcataataaaaataatgaacttgaacaagtatattataacaatccaaatgttcatcagaacaattatcagcttagcaagaacaaaatgaataccacagaattacaacatgataatttatttaataaaataaatccattatcatcagataatacatcgtcaattatattaaatagtaataatatgaataaatctattaataaagatacgtatgttaatatgtacgaaaaacacgaaaaacctctcatggtcataacacaaaaagaagaaaatcttaagaaagataatgtcctgaacacatccttatccagtaataatgaacaaaattgtattattgaaaattttatagaaaaaaatataaatattcaaaggaaagacaacattctatataattcattgtttcaaaaacaaaatcaaggagacaacatcaaaaaggatcaaaaaaataatcaagccaatgaaattatggaaaataatgttacgcctaataatttgtacacaaatattattaccatccctctaccaaaagagaatcaaaataaaacagaagaaaaaacaaaaatagaaaattacaaaattggtctcacctatgatataaccaaacaagaacaaatacataattatgttacaaatctaaatgaagtaagtcaacatgagaagaaggaagaaaatcaaatcgaagatatgaacataaacaaaaatatagaacacaggaataattttatcacccatacaaataataacttaaatattgatgaagatacaaaaaaaatgcaaaaggatatattttcagcttttttaaaaaataaggaagatcaacaaataatggatatcaaaagtaaaaatgataacatggaaattaagagggataacatcaaaagtaaaaatgataatatagaaattaagaaggataacatcaaaggtaaaaatgataacatggaaattaagagggataacatcaaaggtaaaaatgataacatggaaattaagagggataacatcgaaagtaaaaaggataatatggataatatgaaaaatcagatcaacataaaaaccgaacacgtaaaagataatattaataagaataattttttggtaacatcaaaagagaaggaacataatatagatacatccttgaataaacatcatgttttggataacataaataattgtcataattttaataatacgaatttattaaatagtaaaacattcatagaaaaggatatatttcaaaataataatatatttaatgaaggaaaaaatataaaagaaaaggatatacaaaatattaaaaaaagtcaagaaaaagaaattaataatgaacatactaattcaaatatatttacaaatcctttacaagaagcaacaaaatatttggaagaaaaaaataaaaaaatggagtattctcaaaaatttccattctttctaaattttacaaataatataacgtctaataaagataacaaagaacaacaaaataaaaattacaacaacgataataataatgataataatgataataataataatgataataataatgataaaaataataacaaaagtaatacatatgaccatttaactagttccccttcaacaaaaaatattttcttttcaaataatacattcttaaatatcaaagaacacaaagatgatatttataaagaacaaaaacaagaaaataataaaaacgcaaaaaaaataaaaacatttaattccgaaccatattggaaaagactagaaaaaaaagatattgaagaattcaaacattctgttaataaaagctatatggaaaatatatctattgac

SEQ ID NO: 175 - DNA, 1572 bp, Plasmodium falciparum
aatggacaagaacatattttaccaaataatcatgatatttatggccataataataaaaatgatacatatatgaacaatgcaagtttttgtgtaaatactcttaacgaagaaaatattaagataaagaaaagatatgtaaaagatatatccatatataacttttgttgtgatgacaagtataagggatgtaatttatatcttcatattgctaaaacgaaaaaactgaaaaattgtaaaatgaattataatattccgtatgagcactttttagaaaattatgatataataaaaatgtacgaaattaaaaaggacaaagggaatgatgataaaaggaatgataatgtgaagaatgatgatgaaatgaataaccatgtgacgaatgatgatgaaatgaataaccatgtgacgaatgatgatgaaatgaataatcatgtgaagaatgatgatgaaatgaataatcatgtgaagaatgatgatgaaatgaataaccatgtgacgaatgatgatgaaatgaataatcatgtgaagaatgatgatgaaatgaataatcatgtgaagaatgatgatgaaatgaataatcatgtgaagaatgatgatgaaatgaataatcatgtaacgaatgatgatgaaatgaataatcatgcgaagaatgatgatgaacaaattaactgtcgagaaaaaatgaatagtgataaccaaataaataagggagagaagaaaagaaacctcatagggaaactgtttgaaatagaaaaagactggaaaataaatatcgatatgcatatagatatagagaaattaataaaggaatataaaaagtgtaataatagaaacgaggaaatacacattagtgataataatcttacggatgataaaaatgaacaaaaatataagtctaataaattacattatatgatatataacttttataaaaatttcgattgtttaatgaatttaataaatagattaaaaaacaattcgattaaatatgaatattatttccctaaaatgattggtgatgttaatgaagagatacgaaaacattatgataagaaaaaagttatattattaaaaaagagtaatattaaatatattagggtatttaataatgaagtcaaaaggattatgattctattttttgtatcttataattcgaagatcttagatttagcttgtggacatggacaagatatgttaaaatataatagtgtacaaaataaagtgtatgtaggtattgatttatcaaaaaaggaaatcgaattagcaaaagaaagattaaatcaaaatgatatgaaaggcttatgtaataatgacaattttatttttttacaaggtgatattttaaataataaattttataggaaatggaaaagtaaaaatataatgttcgatattatttctattaatttggctttacattatgttatatataatgaaaagtcgtcaaaaaagtttttcaaaattattgaaaattttttagaaaatgatggattgcttttagcaaccactatatctactgtaacgttgactgactttctaatgaagcgatcgaatattgaaatgaatggagat

SEQ ID NO: 176 - DNA, 807 bp, Plasmodium falciparum
atcaccgaattactccgattccaaacctcaaaatcaggagacgaaatgatcggattaaaagaatacgtagacagaatgaaggaaaaccaaaaggatatttactatatcaccggtgaatccatcaatgctgtttctaattctccattcttagaagctttgaccaaaaaaggattcgaagttatttatatggttgatcctattgatgaatatgcagtacaacaattaaaagattttgatggtaagaaattgaaatgttgtaccaaagaaggtttagatattgatgattcagaagaagccaaaaaagatttcgaaaccttgaaagctgaatatgaaggattatgcaaagttattaaagacgtattacacgagaaagttgaaaaagttgttgtaggacaaagaattacagattctccatgtgtattagtcacatcagaatttggatggtccgcaaacatggaaagaattatgaaagctcaagcattaagagataattccatgactagctatatgttatccaaaaaaattatggaaatcaatgctcgtcacccaattatatcagcattaaaacaaaaagctgatgcagataaatcagataaaaccgttaaagatttaatctggttattatttgatacctctttattaacatctggttttgctcttgaagaaccaactaccttttctaaaagaatccacagaatgattaaattaggtttatcaatagatgaagaagaaaacaatgatatcgatttaccacctcttgaagaaactgtagatgcaaccgattctaaaatggaagaagttgactaa

SEQ ID NO: 177 - DNA, 1902 bp, Plasmodium falciparum
atgtttacttttcttgttattattgtaaacgtattggtttgcatatgtttcttaaatacaaaataccagattcaactggattatagtgtacctagtaccttaatcaatttagatagatctttaaaatatacgaacataacggtaggaaaagattcctttctttgtatattagataagtctgatagttttgatacatgtgagcaatatgatttattgaaagaggttgatgatttttaccctaatgggtttgacgaacataaagaaataaataataataataataataataaaaagaagaagagttataataataattataaaaataattataatcatatcagcaataatggtgacaatcaaattaataatgattatgatacaacctacaataggtatgattatatagaagaacatctaaataaaaactttcttctaaaatatcaagataataataatatgaactataatttatacctaaaggaagataactacgaaatcgaatatcataatgcacattactggatgaatgtccaagatgaaaatatacaagcaagcgatcttacacaaaatattattaaagatgttggtgataataatacaagttataagaacagtaataataacggttggacttgtaataacgtattgaataaattaaataataaatattccaaagaattaaagggggggaaaaaaaaaaaaaaaaaaaaaaaaaaaaaagataaaaaaaaaaaaaatcattatgattatttttcgaacgaaagaaacgaaaaagttgataaattaaataagacatttaattgtaattttaaaaggttatatgattatattttttataaacataaaattaatgcgtatcataaatatagaatatataataatattaatgatgacgtattattaaaaagtcatataataaaagggaaaatgttaaccataaataatacatgtattgatgcgtttaataatggaaatatattaaaaatatgtttaaataaatctatatcatttataacaaaaagatatcatacgaaacataaaaaacatatcactatatctacttatgctataggaaaagatttattattttctaataatactgttgtacaatattatagtgatggcaaatatttttttgaagtattatttttatgtggtaataataatttaagagttaatagttttgaaaagctgtataatgtatattatccattcattttccaaatatatgaacatttaaatacaactattactaaactttataatattataataaaaaaattaaaagataatgatgtatatttttttaaatcattttcgaattatcaatatactgaagattattataaatcattaaaacaaaaattaatacacaatttaaatttatattatcctgaagctatatatttatatcgtattacattaagtggatatatgttttgtaattatacagagaaaataaatccaccaaatttttttcttttaaaaaatctgatgaataaatgtcatcattttattagagaagatgataccatgtttgaaatatgtttaccatatagtgttatacaatataagaaaaatgcttatgggaaagaaaaatatccattagttttattaggatcatcatataattcacttaatcaaggtaaacccttttatgaaaaaatgtatgatatttttcctgtattaaaatctaatcatatgatgaaaaaaactatagaatattataataaattgaaaggaaacctatcaacatctaatcctttgcccacacaacaaaattcgctatcatctacaaatacgaataattcaaatatatcaaatgtaaaatatgattattcaaataaaaaaaaaaatttaacttcacctcaaatgttgtcatctttagaggaattttcttta

SEQ ID NO: 178 - DNA, 2652 bp, Plasmodium falciparum
aaggacaccacagaagacacagaacaggatgggcagggaccaccggtaaaaaaagacgaagtaaatccatgtgatatagtgtctaaactctttcagaacccaaacaatttttccgacgcttgtaccctcaaatatgttactggtaaaaactacggctggaaatgtgtatcaagtggtaacggtaccactagtagtgagggtcgttccccacgtgtcgcacgtagtgcccctagtggtgataaggacggcgctatatgtgtgccacccaggagacgacgattatatgtggggagattaacgaagtgggcggaaagcaaacaggtgacacaaccacaggaggatggtaaggcaccactagctcccactccgccgacctcgtcggggtcacagagtgacccgctccttaccgccttcgtggaatctgctgcaatagaaacttttttcttatggcataaatataaagtagataaaataagagaggaaaaagaacaacaagaactatttacaaatacatcaacccttggaaaagaacttcaagataaattagaacgtggtaacatacccaccgattttttgaggcaaatgttttatactttgggagattatagagatatattatttagtggtagtaaagacgcgaaaaatggtgtcaacgacatatttagtggtgataaagaaatgaaagaaaaagaagagaaaataaaaggtgcgatacaaacgttttttgaaaatggtgcttcccaacctcctagtggaaaacgaaatgataaacatgaagaatggtggaaaaaccacggtgaacatatatggaatggaatgatttgtgctctgacatacaaagacaatgacgccaaaggccaaacaccaacacaaattcaggaagtgcgtgacaatctttgggacagtggcaagaacgagccaaaaaaaccccaataccaataccaaactgccaaactcgaagaaaaaaacagtggtaccaaacctaccaaccaaaccccctcatccactagtgataacacccccaccaccctcaccgactttatatcacgccccccctacttccgataccttgaagaatggggtcaaaatttttgtaaagagaggaagaaaagattggcacaaataaaacatgagtgtatggatggtgatacacaaaagtatagtggggatggggaatattgtgaagaaatttttagtaagaaatataacgttctccaggatttaagttccagttgcgctaaaccttgtagattgtataaaacgtggatagaaaaaaaaaaaacagaatatgagaaacaaaaaaaggcatatgaagaacaaaaaagtaattacgaaaatgaacaaaaagacaaatgccaaacacaaagtaataataatgctaatgaattttctagaacactaggagcgtcccctacagctgcagcatttttaaataggttaggatcatgtaaaaatgataatgtagaggataatggagaggataaattagattttaacaatccagagcaaacatttagacctgcaacaaattgtggtccatgtcctgtaattggagttaaatgtaaaaatggtaattgcagtgatacttcaaatggaaatatgtgtaaaggaggaatgattactgcagaaaatattaacaattctactgatgatgtaagtatgcttgtgagtgataacagtacaacgggatttaatggtttagatgaggcttgtcaaggtgcaggtgtctttgaaggtattaaagaagataaatggaaatgtgggacggtatgtggtgtagatatatgtactctggaaaaaaaagatacgaatgggcaagaaggtgataaaaaatatatcacaatgaaagaattgcttaaacgatggctagaatatttttttgaagattataatagaattcaaaaaaaattaaagccatgtacgaaaagtgaaaataaatccacatgtataaaaggctgtgtagaaaaatggatagataaaaaaaaggaagaatggaaaaatataaacaataattaccttcaacaatataaatatgttggtaatactttaactaattttttagagattttgatacctaaaattgatctcacaaatgataaaaaaaagattaaggatttacctgcgttcctgaagttatatggatgtaattgcgctgataactcacaaaatagtacacaaaatgatgttgttctatgtttgcttgaaaatcttaaaacaaaagcaaaaaagtgtgaagagaaccacaaacctagtggcaaccaacaacaaccgtgtcaagaatccccctccgttgaagacgatgaagaggacttaacccttgaggaaacagaagaaaatacagaggaggcaaagaagaagatgatgccgacaatttgtgaaactgtggtaccaacagaaccagaagaacctggagagacttgtacaccagcagcagcaggtggtggccacaaccccgaacaaacccccgttctcaaacccgaagaagaagcaccaacaccagaagcggaaacaaaaaaagacaaagccccagtgaaacccccatcacaaccaacaaccccccaaatagtggataaaacccccgccctggtgacctccaccctcgcctggagcgttggcatcggttttgctgcgttcacttatttttttctaaag

SEQ ID NO: 179 - DNA, 1395 bp, Plasmodium falciparum
aaaaaaaccaaagcatctgttggaaatttattccaaatactgcaaatacccaaaagtgattatgatatacctacattgaaatccaaaaataggtacataccatatagaagtggtacatataaaggcaaaacatatatatatatggaaggagaaactagtggagatgacgataaatatgcatttatgtctgatactactgatataacctcttccgaaagtgaatatgaagaattagatattaatgatatatatgttcctggtagtcctaaatataaaacgttgattgaagtggtactagaacctagtggtaacaacacaacagctagtggtaaaaacacacctagtgatacacaaaatgatatacaaaatgatggtatacctagtagtaaaattacagataatgagtggaatacattgaaagatgattttatatctaatatgttacaaaatgaaccaaatgatataccaaatgattatagtagtggtgatattccattcaatacacaaccgaatactttatattttgataataatcaagaaaaaccttttattatgtctattcatgatagaaatttatatactggagaagaatataattataatgttaatatgagtactaaaaatgttgatattccaatgagtgataaaaatgatgtatacagtggtatagatttaattaatgattcgttgaatagtaataatgttgatatttatgatgaagttttgaaaagaaaagaaaatgaattatttggaacgaatcatccaaaacatactaatacacacagtgttaccaaatcaagtaatagtgatcctatagataatcaattgaatttgttccataaatggttagatagacatagagatatgtgtgaacagtggaataataaagaaaaagtattagataaattaaaagaagaatggaataaagataataatagtggtgacattcacacaagtgatagtaacaaaacgttgaatactgatgtttctatacaaatacatatggataatcctaaaccaaagaatgaatttaagaatatggatacaacccccaacaaatctactatggatactatgctggatgatctagaaaagtataacgaaccctactactatgatttttataaaaatgatatctattatgatgtaaatgatgatgataaaacatctatggataacaacaataaccttgtagataagaataaccctgtggatagtaacaactccacctataaccaccgcaaccctgcagacattaacaaaacttttgtggatataaacaatcataaccaacaccctatagaaaaacctaccaaaatacaaattgaaatgaattcaaataatcgcgaagtggtcgaacagcaatatcctatagcggatatatggaatatatga

SEQ ID NO: 180 - DNA, 2709 bp, Plasmodium falciparum
aacatggatatgaataatgtaaatatgaataatgtaaatatgaataatgttgatatgaataatgttgatatgaataatgttgatatgaataatattgatatgaataatattgatatgaataatattgatatgaataatattgatatgaataatattgatatgaataatattgatatgaataatattgatatgaataatattgatatgaataatattgatatgaataaggttgatattaataacgtcgatattaataatgtcgatattaataatgtcgatattaaccatattaatcgtaatataaacgacacaaatgttgaaaatattagtaataataatatggatattcaaattagtgttaataatgtggataataaaaatgctgatatgaatttaaatcatatggaaaaaaaaataatcgaaaatgatataaacaataatattataattaatgataatattattaataacaataataatattagtagtagtgaacatatgaacacaaattatgaaatgctggaaaagatgagtgctgttgaaaataatagttcattaaataaaacattaagagataataattttatgaattcaaatatacttaattttaatataaaaaataatacaaataatagtaatccttttaatatctcaaaggatataaatattttggaaaaacataatttagaaaggaataataatattttggaagaaactagtagtataaaaaatatgacaaataatgtaatattgaattgtaataaaaatataattgataaaaatattattagtaatacctttgataatgttacaagtgaaaacatctcaacattgcaaaagaattattatgaaaacgaaaaaaataacttgataaataatactattaataatgtaaacaataatattaatgatgataataaaaataaaaacatgcaaaattatgtacctgaaattgataacggttcctctttaattaattctccttatttttccaaccagtatgaaaatgttatgacacatatgtacgtagataaatcagttatgcaaaatgaaaactttaacaacatgggaaataataaatttagtatcataaacaaaatgaataatgtaatacatgacaaacaagtatataataataagagtaatgataataataataatagtaataatattaataataataataataatattaataataatattaataataatagtaacaataataataacaataataataccaacaataatatcaacaataatatcaacaataatatcaacaatatcaatagcaataataatactgttgttggtgaatacaatgaaaaaaattataaagatttatcattcgttacaaataacaatgaacatcatcatgatggttcagttattccaaataatttttgtaataattttagtatgtatgcaaatatgatgaatatccaaaatgttaatggtggtacgataaaaggtcatatatccacgacttttaaaacaaacttagatcatattgatcctaacaaaaatgaaatgagtgtatataaccaagtaaatgaatatgatgtaattaatgaatatgatgaaatgaatgaatataatgaaatgaatgattataacgaattaaatgaattacatgaaatttttgttcgttataatttcaattctgatagtgaagaaaaaccatgtttacatgaacgtacatgtaaaattaatgaatttattactgtatgtacaatatgtcatgattatatcaatgaaaatatggaatgtaaactagtttcatgtaataatattgaaagtgaagaaaatttaggtcataaattaaatgaggaggatgaagaactattagtacataataacaatataaataattatgaacaaatattagttgaaaaggaaaaaatagaaaatattcattttgatgaaaatatttatgaagctattccaatggaaaatcttaaaaacaaccttgatgatagtattccaaaaaataataatattgttaatacgaataacagtaataatgttgccttaaattattcaaataatgaaaatattgttaatagtagtagcataaataataataataatgacaataataataataataataatggagaccatgattgtttgatcacaaataatatttctattttagaaggaaatgaaggagatatgaattatatatataattcatatgaggaattttatattaacaataatactatggatgatatgaaaaataataataactatatgaataatctcttttatcaagaacataataattattcgacaactgctgataattttgcttctaaccaaactcctcttataaaacatcagaaattttattatgctgaaaatagtaataataattatcttagtgattctgcaaattatgtaaatggacaatctttctcaaacaatgatgaattatttaaaaatgattctttatatagtgataataattctcctttaattagtaacaataacaataataataatagtaataataataataataataataataataatagtagtgataatagtaataataatagtaatagtagtaataacagtattagtagtaatgctaacccaacgaataatgactgtaatgataattatcaggaaaattacgataactttattaaatcagaatgtaataataattcttgttacaatatagtacaaatttga

SEQ ID NO: 181 - DNA, 798 bp, Plasmodium falciparum
atgggacaagaggtatcgagtgttaacaacacaaaaaatgaacaccataaaacaaataagaaaagtttgaaagggggtaatgagagacatgaaatgaaagagagtagtgtaggtatatctaagaaaatcgtagagaatagttttaataatagtaaattaagacctggtatgtttatacagaatagtaatgttgtatttaatgaacaatataaaggaataaaaatattgggtaaaggttcttttggtgaggtgatacttagtagggataaacatactggtcatgagtatgcaataaaagttattagcaaaaaacatgttaaaagaaaaactgataaagaaagtttattaagagaagtagagttattaaaaatgttagatcatattaatataatgaaattatatgaattttttgaagataataattattattatttagtgtctgatgtatatacaggaggagaattatttgatgaaattattagtagaaagagattttatgaaatagatgcagcaagaattattaaacaaattttaagtggaattacatatatgcataaaaataatgttgttcatagagatttaaaaccagaaaatattttattagaaactaaaaataaagaagatatgataattaaaattatcgactttggattatctacacattttgaatatagtaaaaaaatgaaagacaaaataggaactgcttattatattgctccagatgtattacatggtacatacgacgaaaaatgtgatatctggtcatgtggagtgatcctctacatacttctctcaggg

SEQ ID NO: 182 - DNA, 1404 bp, Plasmodium falciparum
atgaataagttattgcttttttgtcttttcctatacagcgtcgtagctgtaagaccctacaaggaacgttatggtaatgtttccaagcatttagataacgagtttaagaagaggaaccctgatggaggtaaaccattcaatttaaaagaaaatattaattatgtaagaaaaaataattatgagttgtacgttgatgccaatggagaattaaaacaacagaattataatgtgaatgaaccaagacaagttttaaaaaaaaatatggataaatttcgttatttaataaacgatttagaagtattatttggtgtgtatgaattaaatgctagagataaagaaaaggtattaagagagactttaaaaaaagaatctttatgctttactattgctggattagtatcaaatagtcttaaccaaataaatgttgaggattctccaatatatggattattgatacaaggagaaagagatagaaattatgaagtaaataatacacttgatatatatgtgatattatcaaatataagtgttcctttaggtagtttttttttcccagaaatgaaaagagctccatatcaactaccatatttagttggtcattatgatagtagaagtggaattaaaaataagagtatatcttatttatgtccattacctgaatttttaatagatgtaatgagaacaactaaatatggattaaaatttaattttaatggtactgatctggatgtaaaggaacttttccctgtgactttaacaaatacactagaaacagctagtctcttacctgttcaaaaagaagattcgtataagaatgagcgtaacgtgttattaggtatattacaaaatatatcaaaagatataccatatagaaaggttgtagatagaggagtacaaggtaatggtattattaaccctgaagaaagaatattagcaagtaaatccttttctagttctcgtgaaaatattaaaaattttgtatcgaattctggtaaaagttcattagatacaagttctatggctttatactttttagcattaagtcaaaatttatttgaacgaactagaaatgcagtaccatctagtaatagattaactaatataactgtcacaaatgttcaaacaaataatgctggatatttaacacactatactctaaaattaggtttagaaaattcaagatcattaacagtagaaggtttagttaacgggaaaaatatatttgtacctaaaggtatacaaaatattgaaaccgtggtatcatatgatgtaccatatacatggggtattatggtaagtcctcaagaaggattttcatatatctttggaaacttggtttttgacattgcaaaatctttttcttataatgtaaacaacttatcctcatttgtaaggagtccatag

SEQ ID NO: 183 - DNA, 840 bp, Plasmodium falciparum
ggtatgattttaatgtccgaactatccaaaagaagattcagaagtgtgaacaaattaatacgtgtaggtaggcatgaggttgtacttgtattaagagtagatagccaaaaaggatatatcgatttatcaaaaaggagagtatcaccaaaagatataataaaatgtgaagaaaaattttctaaatctaaaaaggtgcaccagactgtgcgacatgtagcaaaagaacatggcattactgtagaagagctaaacgaaaaagctatatggccattatatgaaagatatggacatgctttagatgcgttgaaagaagctacgatgaatccagaaaatgtatttaaagggttagatatatctgaagaaataaaaaattcattattaaaagatattaaattaagacttactcctcaagcattaaaattaagaggtagaatagatgtatggtgttttggatatgaaggtattgatgctgttaaggaagctctgaaaaaaggaaaagagatatcgaatgataaagtttctattaatataaaattaattgctccaccacaatatgttattgttacgtcttgtcatgataaagatcttggtatggcaaaaattcaagaagctatgaaagttataagtgataaaatcaaagaatataaaggaggtgattttaaacaacaaggagaaattttagttatcggaggtgatgaagaaaaacgtttagaagaattattagataaacatgatggaatttcaagtgatgatgatgattataatacaagtgatgaagatgacgaaaattcaagtgaagaagacgaaaatactagtgaagacgaggaggaggaagattaa

SEQ ID NO: 184 - DNA, 2028 bp, Plasmodium falciparum
atggtgttagtagtagagtatcataatataaatactcctgttggaaaatattcagagttggagaatttgaaagaagaaaaggaaaaaagattatataataatttggaatatgtaaatttattagacataagaactttggaaaataaatctatatatgtatcttcagatttattgaattttttaaaatgctattcaaatttgaatatcaacttgaataaggttccttatgatttggtctattcatttttgcttgatggagaattatatttaggatatgatatatctgtttttattttattagtaaaagcagaacattttgaatattgtagaagaatagataatgaaaatagtgataagaaagaaagttttagaacaaaaaataaatcaacaattaaaagatcatcacagatagatgatgaagataatttacaaggattgttgattaaagaaaaagaagattatttatcatttttgaatgaaaataatgaggctttaaaacaatatatggaatccgaaaaaagaggaaatcctttgtggcatttggatgaatctaaatatatggataaagattggtatgatgaagaagattcatcatttatatttaagcctacttttaattatttaggaaagaataataataataataataatcataataataataatgctttttctaattttgtaatgggcaacttatcttctgataatatttctggatgcttctttgtggagaaattaaatgcttatcttttcgccatgttggataaatgtagcaataaaacagttatatctgtttttccatatgaaaaatttggaagacacgaatccagaaatttagctatccaattttcccaatatgaggactatatgcataggataattgaggacagactttatgcgaatattcaaaataatctcccaagtgttcacaatatgaagaatatgagtaatatgaataatataaacaataataataaagatattattattaatagaagtggtatttctaatggtaatagccaaagtgttccttgctttgaaaatattttggattatgataaattaaaatttgtggaatatataaattcctttagtgatgtaaagaaatcatcttcattcgatattattggtagcagcaaaaatatatatgaacaaggtgaaaacctgaagaactattgtatatatcataataataattttgaaagtggatttgaaaattatattttggaaaataaacaaccattggaattaattgaaaatcatttcgacataatggaaaacattaaagggatgtatgataatacaaatcaggaggaaatgaatttcaataatgtttcagggttgttgagggaagacaattcaaatatgaatgaaatatacctaacgagggataatcataataataattatcatgaaaatgaagaaaatatatatagtattaatattaaatatattaataatcattttaataataaggatgatatgattatgaaatgtaaaaatatgaagggatctatttctatggataataatagtagtaatagtaatagtaataatactcattttgagaaaacattggaatccataaatcctgatgaccataatatttttaacagtgaaatggattctatgaaaaatgaaaataacgatgaagaagaacaaacagccacaagtatttataacattttaggaaagattggaaaagatacatatattaaaagatgtagtagtaattataactatgataacaataatggatatagtaacgaaagtagtgacaattataataatgggtataatgatagtacagataataataatggatataatagtaatagtagctataatagtaataataatgaagatgataataacaataataataataatgatgagaattgtgataataataataaccataataataataattataataataataataattatggtaacaataataataacaacaataataataaggacaataataataatgatggaaatggtagtagtaataataat

SEQ ID NO: 185 - DNA, 2022 bp, Plasmodium falciparum
aataataataaggacaataataataatgatggaaatggtagtagtaataataataataatgatgatgatgacgaagaagaagaggatgatgaagatgataacaataataataatgatgatgataatatgagtgataacgaagaaatggaagataatgatgaagataacgatgagtataataatagtaatgatagttataaatatgaagaaaaagatagtaatcatgaaaaggatttgaaaaaagatataatagaaggagatatgattaattctgttaaatatgataaaaacattggtcatcatactacaaataagagtgaaattagtactaactattttgagaacagttgtaacatgagtgtaaataatagtaataacgaagcatatgatgataattgtaataatggttttatgaatcatgacgaaggattaactcttaataatgggaatgtttcaaataataaatgcgatattataataccagaagatggaagtgttatgtatgaaaatatgattaacagaggaaacggtcttacaagtaacattaacaataataataatgtaagtaataataatagtataagttgcaatgcagatgataatgtatataataatataaataattatataaacacatatatggaaactacaaacaataagaatcatattgagaatagatgtaatcaagattcatacagtacgaatgaagaacctttatccaatcattctataaatgatccaggaaaaataaaagatggcataatgtatgatggaaatgatttggatatgaatggtacccaagaacatagtaaagaagaagggatggatgtttttgaacctaattttttcgaattaaaaagaaatagttcggatggtcaaaataaacatttagaaccaggagttcaaaagaaaattagtaaaaaaagaagtaaagtgaaacatgaaagaaatagtaaaatacttgatgatgaaaagaaagaagtattaaataaagtatctcaaataacacgagttggaggtgtttgttttgataagaatagacaaagatggattgcacattggaaaattgacggaaaatatcataaacattatttccctattagtcaatatggatttgaaaatgctcgagaaagagcagttagttgtaggaaacaagctgaaaaactatttaacttaccagaaattcaaccaagaaatagatggaatcaaataaaagtcaatggtacttctcacataaaaaaagctgcaaaattaccaagatgtgaaggtattggatatgatgaattgtctcaaagttgggttagtacttttgttgttcataaaaaattttctattgaagaacttggattttatgaagcaagggaaaaagctatatattgtagaaaaacatttgaaaaggtaaatgttcatgatgattatgaatgtttattaaatgaccgattaggtttacgtaatgaggaaaaagatgaattatctgatctaattaatatagataaaaatgcattggataatctagaactggaaacatctgttcataataataataaagtgaaacataataataacaacaacaacaacaataataataataataataataataataataataattctgaaaaaatgagaattaaaaataatgatttttcagttgataataataatgaaaatgttggaacaggagaaattaaaatatccaatgataaatatttaaaaataacacaagaagctattgaaatgattctaagtaatatcaaacataaatccttaccagaaattaaaatgaaattaattgataaacaaaagtttgaaaattataatacattactagataaacattttaaatttattacatctgtaaaaaacatttcacagttaagacgatatatatcactctttcacaaatttataatttatcatacacttcctcataatatttctttaaggaaacaattatttattatcgaagctttagaatggtcttcgtttttttcaggtgcagctagcgaaaaagtggaataa

SEQ ID NO: 186 - DNA, 2157 bp, Plasmodium falciparum
tctataaaaccagaagtttatttaaagaaatactcggaaaaatgttctaacctaaatttcgaagatgaatttaaggaagaattacattcagattataaaaataaatgtacgatgtgtccagaagtaaaggatgtaccaatttctataataagaaataatgaacaaacttcgcaagaagcagttcctgaggaaagcactgaaatagcacacagaacggaaactcgtacggatgaacgaaaaaatcaggaaccagcaaataaggatttaaagaatccacaacaaagtgtaggagagaacggaactaaagatttattacaagaagatttaggaggatcacgaagtgaagacgaagtgacacaagaatttggagtaaatcatggaatacctaagggtgaggatcaaacgttaggaaaatctgacgccattccaaacataggcgaacccgaaacgggaatttccactacagaagaaagtagacatgaagaaggccacaataaacaagcattgtctacttcagtcgatgagcctgaattatctgatacacttcaattgcatgaagatactaaagaaaatgataaactacccctagaatcatctacaatcacatctcctacggaaagtggaagttctgatacagaggaaactccatctatctctgaaggaccaaaaggaaatgaacaaaaaaaacgtgatgacgatagtttgagtaaaataagtgtatcaccagaaaattcaagacctgaaactgatgctaaagatacttctaacttgttaaaattaaaaggagatgttgatattagtatgcctaaagcagttattgggagcagtcctaatgataatataaatgttactgaacaaggggataatatttccggggtgaattctaaacctttatctgatgatgtacgtccagataaaaatcatgaagaggtgaaagaacatactagtaattctgataatgttcaacagtctggaggaattgttaatatgaatgttgagaaagaactaaaagatactttagaaaatccttctagtagcttggatgaaggaaaagcacatgaagaattatcagaaccaaatctaagcagtgaccaagatatgtctaatacacctggacctttggataacaccagtgaagaaactacagaaagaattagtaataatgaatataaagttaacgagagggaaggtgagagaacgcttactaaggaatatgaagatattgttttgaaaagtcatatgaatagagaatcagacgatggtgaattatatgacgaaaattcagacttatctactgtaaatgatgaatcagaagacgctgaagcaaaaatgaaaggaaatgatacatctgaaatgtcgcataatagtagtcaacatattgagagtgatcaacagaaaaacgatatgaaaactgttggtgatttgggaaccacacatgtacaaaacgaaattagtgttcctgttacaggagaaattgatgaaaaattaagggaaagtaaagaatcaaaaattcataaggctgaagaggaaagattaagtcatacagatatacataaaattaatcctgaagatagaaatagtaatacattacatttaaaagatataagaaatgaggaaaacgaaagacacttaactaatcaaaacattaatattagtcaagaaagggatttgcaaaaacatggattccataccatgaataatctacatggagatggagtttccgaaagaagtcaaattaatcatagtcatcatggaaacagacaagatcgggggggaaattctgggaatgttttaaatatgagatctaataataataattttaataatattccaagtagatataatttatatgataaaaaattagatttagatctttatgaaaacagaaatgatagtacaacaaaagaattaataaagaaattagcagaaataaataaatgtgagaacgaaatttctgtaaaatattgtgaccatatgattcatgaagaaatcccattaaaaacatgcactaaagaaaaaacaagaaatctgtgttgtgcagtatcagattactgtatgagctattttacatatgattcagaggaatattataattgtacgaaaagggaatttgatgatccatcttatacatgtttcagaaaggaggctttttcaagt

SEQ ID NO: 187 - DNA, 2436 bp, Plasmodium falciparum
atgaatatttcatttacggtgtgtagcttatttatattactaattaatgttgttttacatggagcgcaaaagaattctgaaaaaaatgtatacacggaaatatgtgaaaagccagcgaatggaaatgaatcaagtgtatactgtatgaaagattacaaaaagaaaagttctttatatggttataaacatattatgaatttcttattaggaaatctaaataaacataaaaataatatagcagtagtggaacatgataatggtgaaccaaacaattatttgacttataatgatttttttaaaaaagttttatgttttagtaatacattgaatacttatgaaggaaaaggtattgaagaaaaaatgtataaaaaagaagaaaaaaataatggtaaatttagattgttgggtttgtatggtagtaattcaataaattggatagccgctgatatggcttctatgcttagtggtgttacaacattagttatgcactccaaatttagtttagatgtaattgtagatatactaaaggaaaccgaattagaatggttatgtttggatttagaattggttgaagggttattagctcatagaaatgaatttccacacttgaaaaatcttataatattagatacattaaataaatcaaataaaataaattctaaaggtttagaaaaaagtgataaaaacaaaaaatctaaggaaaaagataatggtttagttaatgttgattatgataaagaaaaattaaaaaaaataaaagatttaaaagtaaaagctagaagtgttggaataaatattatggaatttgatgagatgtcaagaaaagaacctaaaaaaataaaaataaataatgaagaccctaattttattgcttcaattgtatatacatctggaacatcaggaaaaccaaaaggtgttatgttaagtaatgaaaattttcacaatactgtagtaccattatgtgatcataatataataaaagaatataatcccaaaacacatttttcttatttaccagtatcgcacatatatgagagagttcttgttcatatcttattcatgttaggtggaactataaatatatggagtaaagatataaataatttctctaaagatttattaaattctaaaggtgaagtactagcaggtgttcctaaagtttttaatagaatttataccaatattatgacagaaataagtaatttacccccttttaagagatggttagtaaaacgtattatatctatgcgtaaggctaataataatggaagttttagtcaatttcttgaaggactttttaaaatttcttcaaaaattaaagacaaagtaaacacgaatttacaagttatattaaatggtggtggaaagttatcacccaaaattgctaatgagttaagtgttttattaaatataaattattaccaaggatatggtttaacagaatccactggtcctatttttgtgcaagatactagtgataacaatagtgaaagtatgggaatacctttttctccaaatacaaagtttaaagtaaaaacatgggaaacttataaagccaccgatgctttaccaaaaggggaattactgattaagagtggttctatatttagtggatactttttggaaaaagaaaatacagataaatcttttactgaagatggttattttaaaacaggggatgtggttcaagttaatagtgatggttcattaacatttttagatagatctaaggggttagttaaattatcacaaggtgagtatatcgaaacagatttgttgaataatctttattcacaaattagttttataaataattgtgttgtatatggtgatgattcaatggatggaccactaggtattctttctgtggataaatatttattatatagatctttaaaagatgaccatatgttagaaaaaactggaattactgaagataattataatgatagattaaatgatgaagatataaatcaatctatttttgttgaatatgtcaaagagaaaatgatggaaacttataatagtacaaaattaaatagatataacataataaatcatatttatttaacatctaaaatatgggatactaataattatcttacacccacattaaaggtgaaaagattctatgtatttaaggattataactttttcattgaagaagttaaaaaaacatataaacacaaattaaaaggagttgatgaagtcaacaaaaataaggaaaaaaaagaagagaagaagaatgaaaaaaataaaaaccaaaaaaatgaagagcaaaattcaaaagatatacataccaaaaacgcagttcagcaatcgaagttaaggcccacaaaagaaaattttacagaaaagaaagaagaaaaagaaaagaatacaaaattaagagtacgagctaaagatatgtcccaagaattagaattaaataaataa

SEQ ID NO: 188 - DNA, 819 bp, Plasmodium falciparum
atggaaagaatattatcttctataggaaaattaagtgttgtagcaggggggctaagtttaattccatatacatttatatatgatgtagatggaggggaaagatgtgtaatgtttaatcgttttggaggtgtgagcgaaaatacatttggtgaggggagtcatttttatgtgccttggtttcaaacaccatacatatatgatataaaaatgaaacctaaagtaataaataccacaacaggtactcgtgatttacaaattgtaacaataagtttgagattattatttagacctcatacacaacatttaccatatttacatagtaccctaggacctgattatgatgaaagagttttaccttctataggaaatgaagtacttaaagctgttgtggcaaaatataatgcagaatctttattaacgcaaagagataaaatatcaaaagaaatacgagaaagtataacagcaagggccaaacattttaacattttattagatgatgtagctattacacatttaagttatggtaaagaatttgctaaagctatcgaagataaacaagttgctcagcaagaaagtgaaagagtaaaatttatagtagccaaaacggaacaagaaaaaattgcggctgttattaaagcacaaggtgaagcagaagcagccaaattaatttcatcagctgttaaagaatacggtaaaagtttaatagaaataaggaaattagaagctgctaaagaaattgctgaaaatttaagtaaatcaaaaaatgtaacttattttccatccaattcgaatattttgttaaatcctagggatttttaa

SEQ ID NO: 189 - DNA, 2121 bp, Plasmodium falciparum
gcatttgaagtagtatgtagagatgatgagatgaaagaaaataaaaatgtaaaggaatatattaatgataataaaaaggaagaacataatcattataataaaaaggaagaacataataattataataaaaaggaagaacataataattataataaaaaggacgaacataacaattataataaaaaggaagaacataatatttattgtgataattcttctaattatcataatagaaagattacctttttcgatacgccaggacattccgtattcagaactataaggaaacgatgtgtacaatgtagtgatttgatcgtattagtaatttccttagatgacggaattatgagtgaaaccattgaatgtattgaactagccaaaacgtacaatacaccacttattatagctgcaaataaaattgataaatttcataaaaatattgaagagctttcaaaaagtttattaaattataatatcgttactaatttagaaaatggggatgttcccatggttccaatatctgccaaaaaaaatataaatattgatattttaaaaaagcaaattttacatgttagtaataaattaaatttaatgtgtgattatggatctttatgttcagcttatatattagaaaaaaaagtggacccttctaaagggaaattattaactgttatatgtaaatctggaacattaaaagttaatacatattttataattggacatatatatggaaagatcaaaagaatatataatagtaataatgaaatagtatcacaagcatatccttcagaagttgtacaaatcataagttcaattcctttatcatatgataatataaattatggtgatattatgttagaaatgaatactttgaaatctgctcaaaaagtatctaaatataagttaaaattagttcaatataatttaataaatgatcattataatatgaacaatactttaggtgaaatatctagaaatatcgaaacaaataaaaataatgatattcataataatgataataatttagatgataacattatcgatgaattacataatgatatatctatatatgatggtaataaaaaaaaaaaaaattctaacaaattggatattaataaaaaatataacaataataataaaaaatataacaataataataataataataatatatataataataatatatataataataataatatatataatatatataataataataataataaatattacaataatcatagtaacgatttaaggaatccattaaataagttcaatagcaagaataataatttgagtggttctaattttaatttaaattctttcaagttaccgcaaatacctttaattttaaaaacatgcgatgaaggtagtttagaaggtataatggaaggaatagaacattttaacaaaaatgagactaaagaaaaatattgtaatatacataattttatagataggaattatataaataagaatatgttaaatgatgatataaataatatatctaaagaattattttcaaattggtgtcctttaaaaattataaataaaggattaggtacatttcatagtacagatttaaaatattgtgaacatataaatccatgctttcttatttcatttaatgttgatattgattttaaattattacaaccatatatagaaaatcataatattattttaagaaatcataatattatatatgaattatttaatgatatagaaaatatgtgtaacttttattttgattctttacatgtctatgaaccagtcgcaaaaatgattataaataaaactgggtattattctattaaaaaaaataaaacaaaaaaagttgttatatccgttgatataaaagaaggatcatttacatccaatgaatattttacacttaaaagaaataaacaaattattcataataaaatacatatactttctatgcaaaaaaataaacaaaatacaaacgagctaaacaaatcatgtaatattaacgccatcatatttaatattaattctgatgattttgaggtaggcgatgaaattgtggcttacaaaaaggttgtaaggtcccccctctttaacacaataaaatcatttgacctttcataa

SEQ ID NO: 190 - DNA, 2019 bp, Plasmodium falciparum
atggtggataaaattaaagaagatgctattattcaaaacacttttcagatatgcttgaaaaaagaggaatgtaataataacaaattatatttagaatcttatgtgaaagaattaaaagaaaacaatgaggagttatattttttgcttgataatttatattttattttacttcacaagataagtgatttacatagacagaagaaaaattgcttaagttatttatgttcatgtgcttctcggttagttgataaaagtttatataaaggtataaatatgaataataaagaaagtgatataataattaatgagatatctgatcaaattgttaatagtgtaattatatatttagaaaatttggatatatatccaaatatgaaaataagtaaaaaagaaagaatggaagtattttatgaatttttaaaaaaatcttgtacatctcgatttttaaaaaaattattgtcttttatagaagaaaacgataaaaatgaagatgatgaaaatagtaaacagttaaataaattctttaatccaataatagatttgatattaagtaatttgaataatagaaatttagtgtatccaaaaaatgatgtcgctgttttgttcagtttcttgacaggtttcaaacctatagctgatttgataacacataataagtctatgtttttatatataaatgtgaatgatcgtatgaaggataatatgaattgtgatataaaaaaggaaagtgataaaaatttattatcaacatgtaagagtatgcctgtaaatacgaccgattcgtctacaaataatataacaacaaatcgtagtaataacagcaatggtaataatgatgttccacaagagggacccacaaccaccaactctaataataataatgcaaataataaccttagtaataataaccttagtagtaataatcttagtaataataatcttagtagtaatagcatcatccgtagaagcgtgccatacgcacatttccatagcaccattatacaaaatagttattcgcgatttagtagagataaagaaattagtacttgtggatacaacttccaattgaatagcttactaggtcgtctaatttcacctacaattattaatatgcccaatatactaaaaaaagaggagattgctatgtataaatatttctttaacagtaatacaaatagtttaaataaaatgacactaaatggattaaaaaatacttatactttattaagaaaggatactgattggattttagaaaattgtgtagaaattataaagaacttattaaaaagtagtagtgatagtaaaaagataatattgctatggataaattgtattcttatctctaatgagaagaaaacaaaaataatgtatcattattctacatatccacaatcattagatacttcttatggattatttttaaaattgttaggagaaaattcttatgggttttgtcttaatatgttttgggttttattatgtttatgtgaacccataactgtaaataaaattaacgatttggatttttttttctttctaagaaatgacccgttctctaaatttttattaaaaaatattacaaaccaatcgtcgtttgaagataaatcaaatgtcgaaaaaattaagaaaaatgttgaacgttccgaatgtttccaaaaagagcctaaatttatcacatgtatattttggatgacctttaaatcattgagtgtattttttaaacctgccgtagatgaatttattaaaatagttcaagaagcggggaatgccaaagataaagatttttattatatgaatatacatgcgtggaaaattttcctgtataacacacgctttaatcaattattgtttaaatttttacatttatgtatgaattattttcttcatgtagcatatgtatatgatattaatggaaatattaataattctatgaaaacttgtttaaatgaacataataatagtttagtacatttggttttaaagtgttgtcctcctcctaacgagaaatattataataat

SEQ ID NO: 191 - DNA, 2016 bp, Plasmodium falciparum
gtacatttggttttaaagtgttgtcctcctcctaacgagaaatattataataatactaaagaaggtacaaccgaggggactaatatagtttcccacatgagggaaaatgaaaaagtggaaaggaatgaacctattggagaaaataaaagaattgaaaataatgatggggttgtcgaaaataaccaaatgaatgaatcaggaagaaatggttccctagatgaagaccttaatagagacgaaagagaaggaatcaacataagtaatgaaagtaataatagggtatcattaggtataaataataacgaagagaataccccaatggtgataagtcctttggatggatcagatgatcgtttatatgcatctccacacttttctataatacctactttttttttaagtgatatatttgaaattttatatttattatacgaattggatttatttaaaagtccgaataatgaaacattaatgaattatttagatatagatttgtttttagccttttctatatttacaatgttaagtgaaaatcatattaaaagtattcatttaagatgtgaatcagctcctaaaacattttcatttttatataaattagataatttaaaaaaagtaattgaagaatctgaattgactaaaaaatatataataaaatcattaacaaatgtatttatagcttcacaaaaaggagaatacacggaaagaatgcaaacacgtgtacgtatagtagagaactttaatagtttctttttaaataaaacatatgtaaatcaatttacacaattagtaataaataataataatttatttgttcacttgatacatttattattaaatgatgtaagttttctagttgaagaggttgtgtcttatttatctgaaataaaaagaagagaagaaaataataagaagaaaaaggattcccaacaagaaaatgaacaagaagcaaattcaaattcttatttaaatgcgactacaagaaataatagaacatcaaatggaagtagcaattctgtagcaaatttaaattattcatctttaaataataataataataataacaataataacaataataataataacaataataataataacaatagtaacaattttaatgattcctcatttaatagtgataataatagtgatgatggagaagacggtggaatggattatgatttatcaaatgaaagtatgagaaacctagcagccaaaacaaaaatgattataacatattgctataagtcatgtatatttttaaatttattatgtaaaaattatccaaataatatacttacatccaataccatactatcacaaatcgttacatgcttaaactgttattttgattatttagttggtcccaaatgtttaaatatcaaagtaaaaaatatggaacaatataattttagaccacaattatggctcaccagtatagtagaatcttatctattcttattgaattctgataaagaacacgaagagttgttaattagagaaatagcaaatgaaggaagatattataaagctgaaatttttaataaagcttattatatatgtaaaagagaaggattgttacacaaagaagaattaaataaatttaaaaacttttgtcaagaaattgtagatatgaaagatgaagtagagttatttaatgatgttgatgatatacctgataatttcttagatccaattctacaagatattatgttagatccagttcttttacctacatctggtattattattgacagaaagaatattgaaaggcatttaatgagtgaacctaatgatccatttaatagagccccactttcaaaagaacaactagtacccatgccacagctaaaggaagaaattcaaaattacataaataaattaagacaagaaaaaaaaaaaaaaaaaaaaaaaatcgataatatagactttgatgtagaaaatgaagaattcccaaattttcatcaagaacaaaatggagaagtgcaaaaaaatgaaacttcaaatatgtaa

SEQ ID NO: 192 - DNA, 1680 bp, Plasmodium falciparum
tttggtcagcatattcagggggtacaatttatgaatcctaatatgaataacgacatgaacagtaatatgaataatattaataataatcaaatgttcttgaataataaccagaataatgcacatgttcatatggttaacaacatgaatttgaatccctctggaaataattcattttttaataattcaaataaacatctgaatatgatgaccatgagttcaaaaaataaaaaaaacgccatattaaaaaatacagaaaataatgaatttgaaaatataaaaagagtacattcaaacagctccaactataataataataataataataatagtgatagtaataataaaaaatcgattaaaatgaatagcaatgaaaacaataatacaacaacaactattataaaaaatatacgagttgaaaacataaagtttaatgaaagtgtcaatttaaaaaatattgatggcttagatctaagtactaattttgttaatggaaaatatatatccaaattaaataatgatgagaaaatatataatgtagtacattctattgtgaaagattctctcaaagattgtttagttgatttttataataatgcaaattatatttttaaagataaattagattttgtatgtaatagtaatactcctacatgtaataatataaatgatttagaagacaacaaaaaggatgacgggcatgtggataaacaaaattattcacttgaaaagaaagataatgaagaacacacaaataataattctgatcctataatggatggtgttgagttggatgtaaaaaagatatctgaaaagaaggaggatcaaattgaaaaggacaaaccaaaaaatgataatacaaaaaatgataatacaaaggaagacaaaaatcaaaatgatgataataaaactaatacatcaattccaaaaactcccaaaaatgaagttaaaaatgttattacctcttccttattgtcaagttttaatatatttagtgctttcagtaatagtaatacacctaattcgaaaaaaaataaatatgatgaagaggaagaaaaagaagaaaaagaagaagaagaagaaaataataaatgtaatgataaagatgatgaggataaaaataagtctcctcaaaatgaagataataaaaatattaccaatgataataatgataataataataataatgtagacaaagaaaacaatttaaaagaatctatagataacctaggaaatgttgatacagataataatattaagagagatgtactaaattataataatatagaagaaaatgaacaaagcagagaatatattttaatagaaattacaaaaagtatatgctctataatcaatctacaacaattaatgcctgttaatactaggttagctaaccctaatcttatatatgatccaaattatgaaaccatatattctaaatggaaaacatttttaagaaaagagcaatcaagtggaaatttaattagtaattgtttttcacgagattttttacatactattttgttatgtaattatgtaactataattgaagatttaagaaaaacggccgttaagaaaaagttgaaatattttttcttacacttatgtttggaatcgggcatatcgattaacgttgcattgatgctgtttataaatgccacgaagcagagcgataagttacag

SEQ ID NO: 193 - DNA, 2034 bp, Plasmodium falciparum
atggctagtgcaaaaggttcaaaaccaaatttaccagaatccaatatcgctattggaattgatttaggtactacttattcttgtgttggtgtatggagaaatgaaaatgtagatattattgctaatgaccaaggtaatagaacaaccccatcttatgttgctttcaccgataccgaaagattaattggagatgctgctaaaaaccaagtagctaggaatccagaaaatacagtatttgatgctaagagattaattggtagaaaatttacagaatcatcagtacaaagtgatatgaaacattggccattcactgttaaatcaggtgttgatgagaaaccaatgattgaagttacctatcaaggagaaaagaaattattccatccagaagaaatttcttctatggtattacaaaaaatgaaagaaaatgctgaagcatttttaggaaaatctataaagaatgctgtcattaccgttccagcttattttaacgattcacaaagacaagctactaaagatgctggtacaattgcaggattaaatgttatgagaattattaatgaacctactgcagctgctattgcatatggtttacacaaaaaaggaaaaggtgaaaagaacattttaattttcgacttaggaggaggtacatttgatgtatcattattaactattgaagatggtatttttgaagtaaaagctactgctggtgatactcatttaggtggtgaagatttcgataacagattagtaaatttctgtgttgaagatttcaaaagaaaaaacagaggtaaagatttatcaaaaaatagtagagccttaagaagattaagaacacaatgtgaaagagcaaaacgtactttatcatcatctacacaagctacaattgaaatagattccttatttgaaggtattgattacagtgttactgtaagtagagcaagatttgaagaattatgtatcgactatttccgtgatactttaattccagtagaaaaagttttaaaagatgctatgatggataaaaaaagtgtacatgaagttgttttagttggtggttctacaagaattccaaaaatccaaactttaataaaagaattctttaatggtaaagaagcatgcagatcaattaacccagatgaagctgttgcatatggtgcagctgtacaagcagccattttatctggtgaccaatcaaatgctgtccaagatttattattattagatgtttgctccttatcattaggtttagaaactgctggtggtgttatgaccaaattaattgaaagaaacacaaccatacctgctaaaaagagtcaaatctttactacttatgctgataaccaaccaggtgtcttaattcaagtatatgaaggtgaaagagccttaaccaaagataacaatttattaggaaaatttcacttagatggtattccacctgcaccaagaaaggtaccacaaatcgaagttacattcgatatcgatgctaacggtatcttaaacgttacggctgtagaaaaatccactggtaaacaaaaccatattacaattaccaacgacaaaggaagattatctcaagatgaaattgatcgtatggttaatgatgctgaaaaatacaaagcagaagatgaagaaaacagaaaaagaatcgaagcaagaaacagccttgaaaattactgctatggagttaaaagctcattagaagaccaaaaaattaaagaaaaattacaaccagctgaaattgaaacatgtatgaaaactattacaaccatacttgaatggttagaaaaaaaccaacttgctggaaaagatgaatatgaagccaaacaaaaagaagcagaatcggtttgtgctccaattatgtctaaaatctatcaagatgctgctggtgcagccggtggtatgccaggaggtatgcccggtggaatgcccggtggaatgccaggtggtatgaatttcccaggaggtatgcccggagcaggaatgccaggaaatgccccagctggaagtggaccaacagttgaagaagttgattaa

SEQ ID NO: 194 - DNA, 2715 bp, Plasmodium falciparum
tgtgaaatagtacaaaaactatttactaatggcgacctacaaaacacttttaaagatgcgtgtgaacaaaaatatggttacccacaacgacattgggggtggaaatgtataagtgatacaaccactggcaaaagtggtgataacaccggtagtagtggtgctatatgtattcccccgagacgtcgcaaactatatataggtaaaataaaggagtgggcaaacagtggtaacacacaggcggcagaaccacaggaggatggtaaggcacagacaccacaaggtcaaacaccatcacaaagtggtaaagagtcgtcacaaagtcagaaattgcgtgaggcgttcatccaatctgctgcaatagaaacttttttcctatgggatagatataaaaaggttaaaaataaggaaatagctgaaaaaaaacaacgagatagtacaaacccatttggcttcacccagtcaacatcaggtggaatgcaagcattaccagttggaggagcagtacagggagcacaagcacaactacccgatggtgccggtggtagtgaccaaactcccgaaaaacaattggctggtggcaaaatacctgaggttttcttacgtcagatgttttatacgttaggggattatagagatatatgtgtggggaacacacctagtggtatagatacaaatgataaagaaaatatgcaaaaaatacaaaataaaataaaaagtgttattgaaaaaagtgattccacacctcgcacacctggtacccactccccatctagtggtacaacccctcaagccttgtgggataaaatctccccttctatttgggaaggaatgttatgtgctttaacatacaaagatggcggagagggcaaaaaaatagaaaaggttaacgatgcgaacggcgacgaccttttccaaaaactgaaagacaaatacagcgactacaagacagtcacactcgaagaagataatacctcctccgccatgtctaccagtcccagaacctccgaaaccacctcagcctctagtgataacacccccaccctcaacaaccccaaattgagtgatttcgtgttacgccccccctacttccgataccttgaagaatggggtcaaaatttttgtaaaaaacgaacagagatgttggagaagataaaggaggaatgtcgcagtggcacaggaggtcatgaatattgtagtggggatggacatgattgtacggataatgatcgtaaatataataaaatgattgcagattttcattgtccaggttgtgcaaaagaatgtatgaaatataaaacatggataggaaaaaaattcgaagaatttaagaagcaagaaaatacatataaagtggaacatggtaaattaacgaataataattgtagtggtagtgataatacaaaattttgtcaacaaataaaaaataattcttttgataaatttttggaattattgagacattgcaaagatggtaaggatgatacggataaagataatgaattaaattttagtaagcctctccaaaccttttctcgttcaacgtattgtaaagcgtgtcctatatatggagttaagtataataggggaacatatagcgctattaatgaaagtgaatatatgagcaaaaatggtattagtggagaaaataagaacgataagaaacctacggaaattaaagtacttctgttaggtcggaaaggagaagttaggaataatgatgaagaacttaaagaacttaaagaagtttgtaataatgccggttttgttgaggattatagtcttcaaaaatggaactgccaaaaaaagaatggagtggatcagtgtaatcttacaaattctgtggataatatagatgatagtgataaaattattccgtttaatgttttttttcagcgttggttaagaaattttgtacacgattataataaattgaaacagaaaattcatccatgtataaaaaatgaagatggaaaggaacataaatgtattgaaggatgtaaaaaaaaatgtgaatgtgtagaaaaatggttagataaaaaatctacagaatgggatgaaataaaaaaacattatgagaaacattcaaaagatcataatgaaggtattcctcatagtgttaaaggttatcttgtacaggcaccgtttaaggatgaagttctcaaagctataaaaccttgtgattttgataacttcaagacttcgtgtggtcttaatggcactgataattcacaaaatggtaataataacgatcttgttttatgtatgattaaaaaccttgaaaaaaaaattgaacaatgcaaaaagaaacacgacgaaaacaaaaaaacaccgtgtgatccattaccccctctacctgacgaaaacgatgaaacccttgaagaaaacccagtggcgcaaccgaacatttgtccgcaactaccagaggaaccaaaagagacttgtgaagaagcagtcactcctagtgaaccaaaaaaagcggaagaagaaccagcagcagaacccgaagccgtgcccgaagaagaagcaccgttacctccacctccccctgcggccccacctcgtgagagcaaagaaaaagcaaaaccccccccaaaacctcgaatcaaaacccgtcatgtattggaccaccccgctgtcatacccgccctcatgtcttctaccatcatgtggagtattggcatcggttttgctgcgttcacttatttttttctaaag

SEQ ID NO: 195 - DNA, 1416 bp, Plasmodium falciparum
aaaaaaaccaaatcatctgttggaaatttatttcaaatactgcaaatacccaaaagtaattatgatataccgacaaaacgttcacccaatagatatataccttatactagtggtaaatacagaggcaaacggtacatttaccttgaaggagatagtggaacagatagtggttacaccgatcattatagtgatattacttcatcttccgaaagtgaatatgaagagatggatatcaatgatatatatgcaccacgtgctcctaaatataaaacgttgatagaagtggtacttgaacctagtggtaacaacacaacagctagtggtaaaaacacacctagtgatacacaaaatgatataccaactagtgatacaccaccacccattactgatgatgagtggaatacattgaaacatgattttatatctcaatatttaccaaatacacaaaatacggaaccaaatattttacatgataatttggataataatacccatcccaccccgtcacgtcatacgttggaccaaaaaccttttattatgtctattcatgatagggatttatatagtggagaagaaattagttataatattcatatgagtactaatagtatggatgatccaaaatatgtatcaaataatgtatattctggtatcgatttaattaatgacacattaagtggtaacaaacatattgatatatatgatgaagttttgaaaagaaaagaaaacgaattatttggaacaaattataagaaaaatacatcaaacaatagtgttacgaaaaatattaatagtgatcctatagataatcagttgaatttgtttcatacatggttagatagacatagagatatgtgtgaacaatggaataataaagaggaactattagataaattgaaagaagagtgggaaaatgagacacatagtggtaacaaacatagtgacatacctagtggtaaactaagtgatacacctagtgataacaacatacatagtgatattcatcctagtgatatacctagtggtaaacaaagtgatatacctagtgataacaacatacatagtgacataccatacgtgttaaatactgatgtttccatacaaatacatatggataatcccaaaactacaaatgagtttacatatgtggatagtaaccccaaccaagtggatgacacctacgtggatagtaaccctgacaattcttccatggatactatcttggacgatctggaaaaatataatgaaccttattatgatgtacaagatgatatttattatgatgtaaatgatcatgatacatcaactgtggatagtaatgctatggatatacctagcaaagtacaaattgaaatggatgtaaataccaaattggtgaaagagaaatatcctataggagatgtgtgggatatataa

SEQ ID NO: 196 - DNA, 1722 bp, Plasmodium falciparum
atgaaacgcattagccctctaaacacccttttttatttaagtttatttttttcatacacatttaaagggttaaaatgcaccagaatatataaaatcggaacgaaagcgttaccgtgttctgagtgtcacgatgtatttgattgtaccgggtgtttattcgaggaaaaagaatcttctcatgtgatacctttaaaattaaacaagaagaatccaaacgatcataaaaaattacaaaaacatcatgagtctctaaaattaggggacgtaaaatattatgtaaacagaggagaaggaatttccggaagtttaggaacgtcgtctggtaatacattagatgatatggatttaataaatgaagaaataaataaaaaacgaacaaatgcacaattagatgaaaaaaactttttagattttactacgtataataaaaataaagcacaagatatatctgaccatttatctgatattcagaaacatgtgtatgaacaagatgctcaaaagggaaataaaaattttacaaataatgaaaacaattcagataatgaaaacaattcagataatgaaaacaattcagataatgaaaacaatttagataatgaaaacaatttagataatgaaaacaattcagataatagttcgattgaaaaaaattttattgctttagaaaataaaaacgctacagtagagcaaacaaaagaaaatatttttctagtacccttaaaacacttaagagatagccaatttgtaggagaattattagttggtaccccccctcaaactgtatatccaatatttgatacaggaagtacaaatgtatgggtagtgacaacagcttgtgaagaagagtcttgtaaaaaagtccgaagatatgatcctaataaatcaaaaacatttaggagatcattcatagaaaaaaatttacacatagtatttggatccggttctatatcaggttctgtaggtacagatacatttatgttaggaaagcacctagtaagaaatcagacttttggattagtagagagtgaatcaaataataataaaaatggtggggataatatatttgattatatatcctttgaaggtatagtaggcttaggatttccaggaatgttatcagctgggaatataccattttttgataatttattaaaacaaaatccaaatgtagatcctcaattttctttttatatatctccttatgatgggaagtcaactttaataattggtgggattagtaaatcgttttatgagggcgatatatacatgttgccagtattaaaagaatcctactgggaagtaaaattagatgaattatatattggtaaagaaagaatatgttgtgatgaagaaagttacgttatatttgacacaggtacatcttataatacaatgcctagtagtcagatgaaaacatttttgaatctaatacattcaactgcatgtactgaacaaaactataaagatatattaaaatcatatcctataattaaatatgtttttggtgagctaatcattgaattacatccagaagaatatatgattttaaacgatgatgtatgtatgcctgcctacatgcaaatcgatgtaccatccgaaagaaaccatgcatatttattaggcagtttatcttttatgaggaatttttttacggtatttgtacgaggcacagaaagtagaccttctatggttggagtagcaagagcaaaaagtaaaaactaa

SEQ ID NO: 197 - DNA, 2028 bp, Plasmodium falciparum
atgtcaaattggaatttttttaatgattacctaaattggtttaatgggaccaccgaatctacaacatttcataatagaagtagtaaaaagggttctaacaaaagtgtatcaacaaattctacttctataaacactaataaaaataatattaatgagcttagtaacagtcaacctaataatagtggacaaacttgtgatgaaatgaaggcctctaatgatggctttgaaaaagatgtaagtaaaataaagtgtgccaagaaatacaatccatttattaatataaaagaaaaatattataaagaatataataatatgaatactaaaaaggagaataataaaagtgaaaaaaaatgtggaattcaaattgaaggtcaaaatggaaatccaagtgaaaatccaagtgaaaatccaagtgaaagtcaaaatgaaaatccaattccatgtcaaattaaaaaatgtgataaagagaatgatcagaatatacccaaaagtggtaataaaaataaagatacaaatttttttaaccaactagggttatcaaactggttacctaattatgatatgccaatttataacgaatataaaaaaggttattatttagataaagaagcaaaagaggttttatccaaaaagggttctaaaaaaagtaatgttataaaaataggaggtgatagtagtaatagtaatatgaacgattttaacgtatccgattgtggtaataatacatgtgttgatacaacatattacgatgcattaaatataaaaccgacagcaaaattaagtgaaataaaaacaagttattataagttagcattaaaatatcacccagataaaaatgcgaatgatccagaagcaaaattaaaatttcaaaaaataaatgaagcttatcaagttttgagtgatgatgaaagaagaagacaatataataaatatggattaaatgcaacaaaggacatgatattaattgatccatccatattctttatgatgttatttagttcggaagaattaagtgattatactggtaccttgagaatagctttttttgttcagctagcttttgaaggtaatatgtccatcgaagataaaaaatcatctaatcaggttatgataaatgagatggaagtagaacaaaaaataagagaagtggaattggctttactattaagaaaaagattacaaccatatgtagatggagatgtggaatgggaggaacaaatggaaaccgaaataaaaggattacttgaatcttcattttcgagttctatattagaatctataggatggacatatgaaaatgtcgcaacatcttatatagctgaagtaactaccttatggggtgtcggagcaacggtagctaatattcaggctgctggaaggaccattggaaataccttcagtgcagctaagtctatgtttaatactgtagtgactataaaagatttttcgttgaatagtgaaaaaattaattctataaaagaaaagaaagataatttaaaaacatcatcgaataattctctgaataatcattcttcttccaataaaggatccagtgaacaaaatggaacaaatgaaaatttaaagtgtgataataatcaagtgaaccataagaataatgtaaacacttcagacaatataaataatgtgaatacatctaatacacacgaaaataaggaagaagaaaaaaaaaacacaattattgataaagaagaaaataaagctctaggagttattataaaaaatgttctcaccttagttttatgggatatcgaatcgacagtaagacaagccaccgagaaagttataagagatgaagatgtgaacattgaaacacgattaaaacgtgctgaaggaatgaaatttttaggaaaattaatgcaaaaatggtcaaaaatcaaaaacgataaatgtgatacaaacgatatcgatgctaccaaacttttagaaaaagctattatcaaagcttctaaaatgccaaacgacgaagatcaaggagaccaagataacatcaaaagagaatacctatag

SEQ ID NO: 198 - DNA, 1761 bp, Plasmodium falciparum
aatgttgaaatattaaagaatgattataatacgctaacagaaagtcataatataattaatagaaggtctagaaatttaggagcgaatccagaatccattagtttaggttatgaattaagtgaaaaggatgaaggaaataaaaatgatctaataaatagtgctacagatgtatcaacagaattagagaatttaaaagaacgtttatttcctgaactagaattatatacaaacgatcaaaattcaagaaataatactccaaatttacgtaagggttctttgggatttgatagttttaaaaaattggaattaggaacactaaatcaatttgataaagataaaatgattaatctgaaagatgaaaccaatatgaatgaatttgaaggatttctaggaagaaattcaatggctagtaatgtagttacatccgaattatttgatgaaccagtagatgatagtagtagtactactactagcacaggtacaaaattgcaaaacgttccatcgaatgataataacggtgaacttttgaaagatgaacctatagatgattatataaataataattcgaaagttgaatcggaagataattattatgcacaacagaatatgcaaagtcagtcgaaagataattatgcttcagaacaaaatgtagcagatcaatcgacagataattatcctacgcaacatgatgtaccagttcaattgagagacaattatgcttcagaacaagagtattttgatagaggtgaacaattgaatgacgtaagtgcagataacaatacaagtaataaattgaaagacgaacctgtagataacaatacaagtaataaattgaaagacgaacctgtagataacaatacaagtaataaattgaaagacgaacctgtagatgacaatacaagtaataaattgaaagacgaacctgtagataacaatacaattaataaattgaaagacgaacctgtagatgacaatacaagtaatattttgaaagacgaacctgtagatgaccatgcaggtaaacatttgaaagatgaacctgtagatgaccatgcaggtaaacatatgaaagatgaacccgttgatattgatagaacaaatattaaaaagggtttaaatgaacaacatgttaatccatggactacaacattagcagatttaaaaaatattaataatagtatgaaaatagaaaaaaataataaaagtaatgaacaggtaaaaaatacgagcgttagcaaatcatgtgatattataaaaccttccaagtttaataaaaagaacctttttgagcaaagacttcaaagtgttgaaggtaaaaacttttttgaaggaagaagtcaaaatttagaaggaagaagtaattttgatgagagatctcaaattgtagaacaaaggagaaactttgatgacagggaccagaacataatggatagaaaaaattttgatgaaagaaatcaacaggttaatgacagaagaaattttgatgaaagaaatcaacaggttaatgacagaagaaattttgatgacagggatcagaacgtaatggatagaagaaactttgatgaaagaaatcaacaggttaatgacagaagaaattttgatgaaagaaatcaacaggttaatgacagaagaaattttgatgacagggatcagaacgtaatggatagaagaaactttgatgaaagaaatcaacaggttaatgacagaagaaactttgatgaaagaaatcaacaggttaatgacagaagaaactttgatgac

SEQ ID NO: 199 - DNA, 1755 bp, Plasmodium falciparum
agaaactttgatgaaagaaatcaacaggttaatgacagaagaaactttgatgacagggatcagaacgtaatggatagaagaaactttgatgaaagaaatcaacaggttaatgacagaagaaattttgatgaaagaaatcaacaggttaatgacagaagaaattttgatgaaagaaatcaacatgttaatgacagaagaaattttgatgaaagaaatcaaaatgttaatgatagaagaaattttgatgaaagaaatcaaaatgttaatgatagaagaaattttgatgaaagaaatcaacaagttaatgacagaagaaattttgatgaaagatatcaaaatgttaatgagagaagaaattttgatgagagaaatcaacaagttaatgacagaagaaattttgatgagagaaatcaacatgttaatgagagatatcaaaatgttaatgatagaagaaattttgatgaaagaaatcaacaagttaatgacagaagaaattttgatgagagaaatcaacatgttaatgagagaagaaattttgatgagagaaatcaacatgttaatgagagatatcaaaatgttaatgatagaagaaattttgatgaaagaaatcaacatgttaatgagagacgaaactttgatcaaagggctccaaatgtagaagagcgaagatatatggatccaagaaatccgaatattccatatgtaaggtttccacatcatcagtggggtcaaggaatgatgtatggaagaccatattatccttgggttccatttatgggagatggaagaggttataatttttataatcctcatcaacatatggtatatggaagaccctattattgggtacctccacccccagcgttagaatatacaaaaggatttaatccaatggaacagagaagagaagaagacaggggacatatgggaggaagaggtagtagatacccagaagaggaaagatataattataacaataagagaagtaatagtatacctgaaggacgaaattatgaagagaatgcatatgagagaggaggagggaataataaatgggattttcgaaatatgtatgatagattaagagatgaagatgaaaatgattatgaccaacctcctagtacatcttcttctaatagaggaagaggtaatgaaagatatagtcaatcaagagatagaagagaagaaaggaataattataatagtgattattatactagaggaaatgagagaacatataataattcaaatgtaacaagtagttcaaatagagaattaataccttacaaaaaagagatattaccttttggtgttagtaattctgaattggaagataaattaacagaagaggaattaaatgaaagaataagaagattagattatacagtatctgttaaagatatgtttatattatggaatcatatacttgcacatgaaagaaaaaaatatacaaaaatgcaagaatatttaatgtattatagtcaatatttagaaaaaacatatcttgttcctacagcttttagaaaaaaatactggtggagggttcattatatgttgaccgaagaagtagttaaaagagaaaggacagataatttagatttccatcaattcttacgtaaaggttcttgtgaaaaacgtgaatttttatattttattaattctaaaagaaaaggatgggctgatcttacggaaacaatgaaaaatatatggatggaaagattaacttataaaatgagaaaatatagtggagcataa

SEQ ID NO: 200 - DNA, 1308 bp, Plasmodium falciparum
aaaaaaaccaaatctactattgatcttttgcgtgtcattaatatccccaaaagtgattataatataccgacaaaactttcacccaatagatatataccttatactagtggtaaatacagaggcaaacggtacatttatatagaaggagatagtggaactgatagtggttacaccgatcattatagtgatattacttcttcctccgaaagtgagtatgaagaattggatattaatgatatatatgtaccaggtactcctaaatataaaacattgatagaagtggtactagaacctagtggtaacaacacaacagctagtggtaaaaacacacctagtgatacacaaaatgatatacaaaatgatggtatacctagtagtaaaattacagataatgagtggaatacattgaaagatgaatttatatcacaatatctacaaagtgaacaaccaaaggatgtaccaaatgattataaaagtggtgatattccattcaatacacaaccgaatactttatattttgataaacctgaagaaaaaccttttattacttctattcatgatagaaatttatatagtggagaagaacatagttataatgttaatatggttaatagtatggatgatattccaattaatagtcataataatgtatacagtggtatagatttaattaatgacacattaagtggtaatcaacatattgacatatatgatgaattattaaaaagaaaagaaaacgaattatttgggacaaatcatgtgaaacaaacaagtatacatagtgttgccaaacctataagtgacgaccccatccacaaccaactggaactattccataaatggctagatagacatagagatatgtgcgaaaagtgggaaaatcatcacgaacgattagccaaattgaaagaagagtgggaaaatgatacatcaactagtggtaacactcaccctagtgatagtaacaaaacgttaaatactgatgtttctatacagatagatatggataatcccaaaactacaaatgagtttacatatgtggatagtaaccccaaccaagtggatgacacctacgtggatagtaaccctgacaattcttccatggatactatcttggaagatctggaaaaatataaagaaccttattatgatgtgcaagatgatatttattatgatgtacatgatcatgatacatcaactgtggatactaatgctatggatgtacccagtaaagtacaaattgaaatggatataaatactaaattagtgaaagagaaatatcctataggagatgtgtgggatatataa

SEQ ID NO: 201 - DNA, 2505 bp, Plasmodium falciparum
gacgtatgtggtataacggaccaacataccaaggatagtcgtcgtcgtcgtcgtcttcgtcgtcttcgacttcttgttcttcgttttcgtcgtcgtcttcgtcgtggtcatcgagattataaaggaccatgtacaggtaaagatggacacaaaaagatgtttcaggtagaaaaaggatgggaaaatgggagcaaaataggtacagaaaatgacgttttcttgccaccaagacgtgaacatttttgtacttccaatgtggaacatttgtacagaagtgccagcggacttcaaggaactactgccagccactctctattgggggatgtgttacttgctgcgaataaagaagcaggattcataaaagaaagatataagacgcaaaaaacttcagaaggttttaaggacgaggcaactgtgtgtagagcaataaaatatagttttgctgatattgcagatataattaaaggaacagacttatggaaagcaaattccggaaaaaaaaatacacaagataaattggtaaaaatatttcaaaagattaaagacaatcttcctgttaacatcaaaggaaaatataacgaagatgaaaaacatttagaattacgtaaggattggtggtttgctaaccgtgacaaagtctgggaagcaatgaaatgcgaacaaaacggtatcacttgtagtggtcctaccccattggatgattacatccctcaaagattacgttggatgaccgaatgggcagaatggtattgtaaagcacagaaagaggcgtatgacaagttgaaggtgtgtgagaaatgtatggataatggaaaatgtacgcaaggtaatggcgagtgtgcaaagtgcaagacagcatgtgaaaattataaaaaatttattaatacatggcaacctcaatggaaacaaatggaacaaaaatacgaaagtttatacaaagaagcacaagaaaatggtaatagtagtcataaaagtactacagaacaagacaaatatatggtagaattcctgtcacaattacaaaaagcaaataatggcgacaaaactggtgacgataaagtgtattctactgctgcaggatatgtacaccaagaagctacaatgaattgtgagaaacaaactcagttttgtaaaaacaaaaatggtgtcaaggcagctaatgatgcagaagacgtcaattatacctttaaggatacgcctaatgggtatgatgtggtatgtaaatgtaaagataggccggagcaacagataaaaaaaaaggaagtagaagatgcgtgcaaaatagcgcaggacatatttaagggtaaggatgaaaacactacagtagggctatgcaaaaaaaaagattttggaagaactccttatcccgattggaaatgtgaaaaaaattcaaaattggtgacaggaaatggtgaatgtatgcctccaagaagacaaaagttatgtttatactttttggcacataaaattgaaacaccaaatttaaatacacaagaagatttgagaaaggcttttattaaatgcgctgctgcagaaacattcttctcatggtactactttaagaaaataaatgataaattaaataaactcgatgaaaaattaaaagaaggagaaatccctcctcaatttttaagatccatgttctacacatttggagattataaagatatatgtttggatactgacatatctttaaaaactgaaaatggtgatataactaaggcaaaaagcaatatagacagaattatcccaaaaaaaagtgccaaaaatcctgatgaagaacgtaaaatttggtgggatggaattaaagaagatgtatgggaagggatgttatgtggattatcacatgctgtcagtaataatgacaaagcgacagtacaaaaaacacttactaccaagaccatctacgactatgacactgtgacatttgatggtaccaccaaattggaggatttctccaagcgaccccaatttttgagatggatgacggaatggggggaagagttttgtaaaaaacggaaggaacaattagaaaatttaaaagacaaatgtccagattatacgtgtagcttcgatactaaaaaacaagaatgtgaaaatcactgtaaagtatatgaagaatggctaaaaggttggaaagaccaatataaaaaacaaagcgaaaaatttacaacagataaagaaaaacctgaatataaagatgatcccgacgttgccagctccgaaaatgctcacaaatatttgagcaaaaaattaaaacaaatttttcacaatggaagtactactgagaaatgtgattatacgtgtatggaatatgcgtcaagacaaccacaaacatctgcttgcagtcaacaacaacaacaacaaaacaaatcatctacacaaaaccatttccctgaagcgttcgattatcctcctaaagaaattggtgataggtgcacttgtcctaaacttccggaacctaaatattgtgtagacaaaaccgcatatgatataagaaaagag

SEQ ID NO: 202 - DNA, 2496 bp, Plasmodium falciparum
cttccggaacctaaatattgtgtagacaaaaccgcatatgatataagaaaagagagtgggaaaaagtcggataatagtttgaaaggaaatggtaatacatacaataataattgtaataattccatgagggaagagtatgccaatcaaaatggagaaacatgtaaatttaacgaaacattttggtccaaaaaaaaaccttctattgaagaatgtgatatcaatgcaaaagagcgttttcaaatacagaaatattgggattgtaatgggaaaacacctgatggaaaaaacacattttgtatccctccaagaagaaaagatatgtgcttgaaacaattggaagaaataaattctgcagatgttaataatagcaaaaaattacttcaaaaaatccaagatgtagcaaaaaaggaaggagatgatataataaagaaactattaccaaaatatccttgtaatgaagatgtaatttgtaaagctatgaagtatagttttgccgatttagcagatattgttagaggtatagataaatataaaggtccaaatggtaccaatgtacttgaaaaagaattaaaaagtgtttttgagacaatatatacaaaatggaaatccgaaaacacaaataataaaagtaaatacaccgatgtagcctcttttcgttccgcctggtgggatgctaatagaaaagatatttggaatgctatgacgtgtaatgctccttatgatgcaaaaatttatattaccaaagaaggaggatatatatctcctttaacgttcacaaaaaacaaatgtgggcataatgatgatccacctgattatgattatatccctcaaccttttcgatggctaagtgagtggagcgaaacctactgtcttgctcaaaaagatttattggaaacgatgaaaaattgtgagaattgcatgaaaaaaaacaaaaatgcagattgtgaacagacacaatatggagcttgtagggactgtaaaagaaaatgtgaagaatacaagaaatttatagaaatttggaaaaaacagtttgaaacacaaaacaaagcatatcaagaaatatatagaaatgctacaacaactaacagagataataataatattgttgatgaaaatacaaaaaattttgtaaaaaaactacaggaaaattgcagaaccgaccgaaacgaatctcttgatactgccgataaatatcttgaaaatgcaagtgtttgtcgaagatttaaatttgggaataaggactcacgtcatctaaattatgctttccatacagatccacctagttatgaagagcattgcaaatgtgcgaaagattttgatccattggatgaatgtcctgttgataataacgaatgtaagaagtatggtataggtagttgtccaaaaaaaaatttccataaaaaattggaagaatggacaaattacgttttaaacaacaaatcaaataaaaataaatccgcaatagtacctcccagaaggagacaattatgtctacaaaatcttacgagaaatttgagtcgtctaaataaagaaaaatcatttaaagaaggaattcttatttcagctgcttcggaagctaaaatgttaactgaacaatatcgtgagaatcctgcaaaggcacttcaagcaataaaatacagttttgctgatattggaaatattataaagggagatgatattatagggaatgttatatctgtccaactaaataagttaattaacggaaataaaaaaataaatacatctaccttatggtgggaagcaaataaagaaaaaatttggaatgccatgatgtgttattacactggagacgaaaaaacagctactagttgtccatcacatggaaatattgataaagaagatcaatttttactatggtttcaggaatggggagaaaatttctgtgctagacaaaaagaattatatgaacacgtacaagcggaatgtagtcatgttatatgtgtcaatggtactggaaatattgacagtaaatgcactgaagcatgtaaaaattatagtaattttatttcagaaacaaaaaacgtatatcagtcattaaagaagcaatataatgataatcataactctatcaaagtaggtggtaaagaagttcatcattatatgaaagaaaaatgtaaagataaatgtgaatgtttgtctgaaaaatttaacagtgacaacaattgggaaaaaccgtatgacacatttgacgataccgtactcaaaaacaaatgtcagtgtaaaaaacctgattccccaattcttccagtagaaccttcagtgccagctgaaacggaaaaagaaaaaaaaaaagattcacctcttaaaccccatactgaaccaaaacctgcaccccccaaaaaacctgaggtacccccgcctccacccgtacaacccccccctgcgaaccaacccttcaatcgtgacattctggaaaagaccattccttttggtattgcgttggcgttaggttcgatagcgttccttttcataaag

SEQ ID NO: 203 - DNA, 1179 bp, Plasmodium falciparum
aaaaaaccgaaatcacctgttgacctcatacgtgtacttgacatccacaaaggagattatggaatgcctacactgaaatcaaaaaatcgatatataccctatgctagtgatacatataaaggcaaaacatacatttatatggaaggagatagtgatagtggacactactacgaagatacaactgatattacttcatccgaaagtgaatatgaagaaatggatattaatgatatatatgtacctgatagtcctaaatataaaacattgatcgaagtagtattggaaccatcaaaaagagatacacctagtagtgatgcacctatgaataaatttactgatgacgaatggaatcaactgaaacaggattttatttccggaattttagaaaatgaacaaaaggatttacctaaaaataatataagtgggaatactccaatgaatacacaacccaatactttatattttaataaacctgaagaaaaaccttttattacttctattcatgatagggatttatatagtggagaagaaattaattataatataaatatgagtactaatagtatggatgatacatcatatgtatcaaataatgtatattctggtatcgatttaattaatgacacattaagtggtaaccaacatattgatatatatgatgaagtgctaaaaagaaaagaaaatgaattatttggaacaaattataagaaaaatacatcaaacaataatgtagctaaattaacaaatagtgatccaattatgaaccaattagatttgttacataaatggttagatagacatagagatatgtgtgaaaaatggaaaagcaaggaggatatattacataaattaaatgaacaatggaataaagataatgatggaggtaatgtaccaatagataacagatcgttgaatacggatgtttggattgaaatagatatggatgatcctaaaggaaagaaagaatttagtaatatggatactatcttggatgatatagaagatgatatatattatgatgtaaatgatgatgaaaacccatctgtggataatatacctatggatcataataaagtagatgtacctaagaaagtacatgttgaaatgaaaatccttaataatacatccaatggatccttggaaccagaatttcctatatcggatgtatggaatatataa

SEQ ID NO: 204 - DNA, 624 bp, Plasmodium falciparum
aaatatattcaaaattttgttaatatacaagaaaccttaaatgaaaaatgtagttcaaaatatataagattgatatcggaacaaacttctgatgaatctacaagtaaatctataaaaaattgtaaatgtgtaaataaacggaacaataaaaatgaggacaatcatgaattacaatcaaaatcaagatctttaaaaggaactgaattagatgttacttcatataataaatcaaaacatacgcaacaaaacaatttaggagattcattgaagagaacaaaaaataatattacaaatatatcttctaaaaagaatgaaacatatttattcgatgaaaatacaaatgaatacaaattaagaaatactttacgtcttatgaacgaaagatatgctgatagtatagtagatactatggatcttaatgataagacaaaagataaatttaaaaaattcttacatttatatatggcgaaggaaaatccagataaacaacgtaagttatatgaacaaattgaaagtgatatagaaaaatacaaaaaaaatcatgttatatgtagcatcgttgattttgaaaatatatatgattctttttattttttaaaatacgaagatagatatataacttga

SEQ ID NO: 205 - DNA, 1878 bp, Plasmodium falciparum
aaaaattatcatcgtccagaatgtggaatgatagatttatttggtagagttatgtgtggtactattaaaaaaggacaaagcgttcgtatattaggagaaggatatacattaaatgatgatgaggacatgataacaagagtaataacacatttatggatatatgaaggtagatatagaatagaagtcgatgaaatacctgctgggaatttttgtttaattggtggtatagatatatgtataaataaaacatgtacaattacaaatgtgaaaataaaaacaaataaaaataaggaagatcatgttaatttaaattggtatgacgatctaaatgatgatgataataatatagtaaaatataaaaatgataaggatatatataatttagacaaatcggctcttttgaatgataatgaaaatgcagaaatattttatccactacataaaaaatttcgttatttaaattgtgtgaattctgtttttaaagtagcatgtgagcctattaatccatctgaattaccaaaaatgttagaaggtcttagaaaaattgataaggtgtatccattatctagtacaaaagtagaagaatcaggagaacatataatattaggaaccggtgaattatatttagattgtattttgcatgatttaagaaaattatatggtgatttagaaattaaagtgtctgatccagttgttcaatttaatgaaaccattattgaaacatcagcacttaattgttttgccgaaacgccaaataagaaaaataaaatatatatgatagcagaacctgtacaaaaagagttaggtgatgatatagtccaaggactagtacatctaaatgaagaccaaaatttaaatgtaaatgagtatataagtacaatggataggatattgaataaaaataatgaatctaagaggaatatttatgatgaaaaggatgattcacatgatgataatgatgatggtgacaatatggagaatcatatgaatggtattgagaacaaaaaaaatatttttaaagataaggaacaaaaagatgaacaccaaataaacgatttagataaggaaaaaaggaaaagcaccttaaattacaatatagatcctaatgtaatatcattattaaaaaataaatataattgggacattttatctattagatctctttgggcttttggtccagaaaataatagtccaaatatattggttgatgattctttatttcaagaaactaataaagaaaatttatactctataaaagataatattattcaaggattttcatgggcaactaaagaagggccattaattgaagagagtatgaaaggagttaaagttaaaatattaagagcagatattgatgatgatccaattaatagaggagctggacaaattatacctactgcaagaagagcaatatattcttcagttttattagctactcctagattattggaacctatattattaaccgagattatatgttcaggagattcagtgtcagctgtatataatgtcttatcaagaagacgaggtcatgttttaaaggatttcccaaaggtaggtacccccttatatatggtacatgcttatataccagcaattgaatctttcggatttgaaacagatttaagaacacatacaagtggtcaagccttttgtattagtatgtttgatcattggcatatagtaccaggagatccattagataaatcggtaatcctacgacctctcgaacctgcacctatacaacatttggcaagagaatttttattaaaaactagaagaagaaaaggattatcagaagatgtgacaattaatagattttttgatgaccctatgttattaaatataaaggatgaattttcagaatatttttag

SEQ ID NO: 206 - DNA, 2421 bp, Plasmodium falciparum
attggaaaaaatttccagatgagaagatttcctattaaaaagttaggttttgaaaaagctaaggaactagctattcaatgtagattagaagcagaacaagctggtgcgacaactacagaaaatcgaaccaaacgtatgagaaatttattaacacttaattctgaaaatgcattagaaatgatgatagatcaaaattcaatagataatgatgatagtaatatacatcaacatatgaaagagaaggggggtggaatgaatggaaatttacgtatgtcacgcatgcaaaattatgctggtgcaggtataagtggtcaaagtgtacatcaaacaaataaattacttaatagtgatgcaggtcaagatagcgaaaatgagttttcacctacgaaaaggacaagagcaccacgaggaagaagaatggagagtttgacagctcgagctagtgcattaacaccagttgaaggggttcgttttgatccttattcttattcttggtttgctaaatatttagaaaatgaaaattcgaaagaacccaaaatttctaagtatttattgaaaaaatggggtttcaataaggctcatagtttggcagttcatactgtaaaatgtgcatataaggcagttccatttacagatgaggaattggtaaatatatttaatgtggatgttaataatttaataaataatcagaacaatatgattaacttgggattccacgatggatttggaactaatggactcatgaagactcagttgaataatcagatgacaaaccagatgacaaaccagatgacaaaccagatgacaaaccagatgacaaaccagatgacaaaccagatgacaaaccagatgacaaatcagatgacaaatcaaatgacaaaccaggtgaataatcagatgacaaatcaaatgacaaaccagatgaataatcagatgaaaaatcaggtgaatagccatataaatagccaagtagctggtcatatgaacgcaaatatgtttaatggaaataatagcaatggtactaatatgcttgggaatatgaatatgctaaataatatggtgaatagcaatatggataataatgtgaataataattatagtaataattatccaggaagtggaaataatggattgaataatatgacaagttgtgttatgaataataatggtggtgagatagatatggatgataatgataatatagagaataacgatcatgaaaatatgatgacacttgagaaggaagatagtataaataatgatagtataataacaacaacaacagcaactaatataaatagttgtaataataatagtaataatgcaaattcgttattaaataggttggtgatgtctaacggatcgaatggtaatacaaaattgaatatcataaataattacaataataataataataataatagtagtagtggtggtggtgttatggttaatataaataatgtgcataataatgataatatgaatacctataacaacaataataataatattttaaatgatggtaatagtgttgtaggaaataacgagagtatgattcataagaaaaatgtggtaaattgtataaataatgatgtagaggacgatttaggaaacatgaataataaccataacaataataataataataataataacaacaataataataataataataacagtaacaataataacaataataataacaatttgaacgtttttatgaatgagcataataatccaaccaacaatcgtggtatatatgggagcaatgaatctataaataataatggacttatggatgaaggtcgacttaattttattcatacggctgggaaacacgttgataagaataatatgcagagcggttcaacaactgtagttaatgtattaaataatgatgagaattatataaagagtaatataaattatacaaatatggataatatgaaaaataatgacaatcccatagatgatgataatcctaataatattgtagaaatgaatcttagagttgagaaaaatattttaaataataataatgatgaacatataataaataacacagaagatatgatgtctacaaataataaagagaattgtacattaaacggtcaaagtactatacttatgaatagtaatgaagaaaatgatgaaacagcattagatactattattcaaccccctatagaaaaaaggaattatgttaatatgatgataaatgaacaaggaacagctgataacaattcaaatgtagacagcagtaataatagttattcaaataatgtatatactaaaaatttaaatagtaattataatggttttaataatgaaaattcaaacactactactaatgaacaaaatgattcctctctttattttatgaatgtaaattcagaaattcaaacagaacatttataa

SEQ ID NO: 207 - DNA, 2934 bp, Plasmodium falciparum
atgatggaaagaggaagatcaaattatagacgtaataatgaaaataataattttagagaaggaaatataaaaaatgaaacaggagatgataatcatttttggaccaatatcgataattattatttttgtaattttgataagagtataatatcagcatttgaaaatcatataaaatgtacagattatatttgtaataaaataaaaaagcggaagataaataaaaaattatttaaaaatattaattgttataaaagttcagtaaaaataaaattaaatggaaatgataaaaatgaacataataataagaagcttgtttgtgcaggtacaaatatgcaatatgacaattatatgaaattcaatgaaaataatatgaataatgtgaataatgtgagtaatatgaataataagaataatatgaataatatgaataatatgaacaatatgaacaatatgaacaatatgaacaatatgaataatatgattaatatgaataatatgaataatatgattaatatgaataatgtaaaccatatgaataatataaatcatatgaataatttaaatcgtatgaataatataaatcatatgaataatataaatcatatgaataatataaaccatatgaataatataaatcatatgaataatataaatcatatgaataatataaagacgagtgagaattataacatttcaaataataataacaaatgtattcaaaataataatattaatgataaaatattaaataatcaaattcagaatgttatgacttttgatgataaaaaatctattcttgaatttatgcctatggcgaaaaatgaattattattaaatacattacatcacttaaatttaagaaatgaacatcctacaaatccttttccgaatatgtatagaaatcctaattattttaataaagacgaaaattatatgtttcttaaaaatcaaggtcctataaataatttaaataataatgttcttcctaataataacaacctgaataatttgaatacccatgtgaataatcaaatggtagaaaacaataataaaacgatgcctatcccattgaataatctaaatgcatacacaaccaataacaacgataacaataataagaataatattttattaaataataatgaacataataacaatccagtaggtggcacgaataaattatcggataaaaatttggaattcttacaaatagaagaattacataacaaagaaggaaataaaaatacaaacgatcaacaagttattctgaaggaagaagaaagagatattcaagttaattcaaataatgaaaagactacgaatgaagaaaacatattattaaatgatttacaaaaaaatacaaataataatgaaacatcaaatgatacaacaccttttaaagatgttaatgatgatattaatattcttaaggaagaaaatgaaaaggaaaatgttataagtaataaaataaattccattaatttggctcattccaccatacaaaatgataatgaaagaataaataatgaggacaataaaaataaagaaaatgtaactattcaagataattatagtaataataataataataataatatcaatagagggtgtgtattgaacaaaaaccaaaataatataaatagtatgaataacataaataataataataataataataataataataatatgaacaattttaataattttcatctaaaccagaatgtacccaataatgatatgtttaaacaacctcttttatttaacaagccaaatatgatgaacatgcatgcttatcatatgaataatatgaaccctagtgaacctccgttttttaacggtccaataattaataacaataaacaatcagtgcaaggatatataaatcctatgaatcataatatggtaaatatgtataattcattcaatcctaatatgagaaatgatattatgaataaacatatgatgataacaccaaacaatctaaatataaatgatgataaaaatatgacaacggatatagataaaactggatatacgtgtccatctaatatgttaccttatgataatatgttaataaataatcaatttagggttaaagatccacatgcatttatgagaaaaagtcacgaaacgcgcattaggaaatttaatgaaaatgatataaaagatgataataatgatgataataataataataataataataatgttaacttggataaatataaaagaagcacaagaagctcaaaatatgatgataatttcttcaacccttttttaaataagaaatatgatggcctagggaaattgccatatatacaaaataaaccaataccaaacggcttacatatatctatctatattccccagtcgtatgattttacggatgaggttaaagatcaagatataaaaacatatgaagacacaaataaaaataatgataaggtaaatacaatatgtgacgaaattaaaaatacagaacatacagatcacgaaaaagatagaaaaagtgtatcatttgaacaagaaaaatcggaattaatcagcaatgaagaatatatatatgaaagagaaacattagctagattattaacagaaataacctttggtgataagaaaaatttgtttaatcctaagatgactagtgaaaataaagaaaaatgttataataccatattaaatgaactaaaaacttataaatcattaccaatcattttgggtaatattttaccttattggacaaaggataaaaatattaagaaaattaaaaaaagcatagaaaagatgaataaaagaaaaaaaaaagtagacaatccacagaaatatccaaatttattttataaaattaaaaatttgaaaagaaataatgataagctgaaatatatacatataagtaatattaataaaaaaataaaaagagcaatgatgaat

SEQ ID NO: 208 - DNA, 1410 bp, Plasmodium falciparum
atgctcattttagttgaaactgctgctggatatggactttttaaagttgagaatagtaaattaattgagtcagatgtaaaagatattgaaaaatgttttgttactagcgaagaagcaagaaaaaatgtatctttgtacagttttagtaaatttaaaaagtttcaaaatgcatttgatgaaaccaataaattaatggaatcaaaattagggaaagggttaaagaaatttttaaaaaagaatataataaaacctaaattgaatgagcccttggctttgtgcgataagactctgggtggattgataaaaaagaaatataatataaatgtaacatatacgaattcaacacaagaaattataagaggaatacgtacgcatttatacgaattattagtaggagtaaatgaggaagattctaaattattaaaattaagtttatcacattcattaaatagatttaaattaaaattcagtgctgataaggtagatgtaatgattgttcaggctgttgggttgttagaagatttagataaagaaattaatgttttttcaatgcgtttaaaagaatggtatggttggcattttcctgagttaggtaaagtaataacagataataaaatatatgctaaatgtgtaaaattgattggttttagaaataatgcaaaaaatgtaaatttattagaagaaacaacagaagaaatacaaaaagaaataaaacaattagctgaaatatctatgggaactgaaatcgaagatgatgatttaaattgtataaatgaattagctgacagattattagaattaacagattatcgtgaatctttagcaacatatttaaaatatagaatgaattctattgcacctaatttaacatatttagtaggtgatttagttggtgcaaaattaattgcaaaagcaggttctttaatgtctctagctaaacatccaagttctactttacaaatactaggttcagaaaaagctctcttcagagccttaaaaaccaaatccaaaacacccaaatatggtcttatatatcatgcaacattagttggacaaaccgctcctaaattaaaaggaagaataagtagatccttggctgctaaattatctttatgtactagagttgacgcactaggtaattttgtagaaccttctatagctattacatgcaaatcgcatttagaaaagagactagaatatatcacaagtaatttacagaaaaaattaagtaacccaaataataacgtcaaagcacaacaacaaggacaacaaaataaatacaatcctaatcaaaaaaatgatggacaaaataatttcaactcttttaataagaggaaaagtgatttcagatttaaaagggaagctgataaaaataacaaaaagtttataaagaagcaaaaaaggaagtaa

SEQ ID NO: 209 - DNA, 831 bp, Plasmodium falciparum
atacgactacgtaaaaccaaaggaggagagatatttcattttaatgacattatggggacacttcttcatgaacttgtacatatagttcatagtcgacatgataaatctttttatgagttactagacaaaataacttgggagtataacgagttatatgtatataataagaagggtatatctggaggagataaggttagtactaatataattaaatataatttgggtagaaataatataatgaaagataatataattctggatattacaaaaatgaataatgtaattagtatttgtgaagagaatcctaagtttatggctgctcaagccgcagaaaaaagactgcttaataattttatgaataatcaaggagagattgtgaatgcatcccttttaagttgtttaactaaagaacaacgtgaaaatttattaaataatagaaaaaaatatgatgatataatttgttgtttagataatgatattattttaatcgatacaatctctgatacatatgataaggaatatgatcataaaagtatggtttctcaaaagaaaagtgataatgtatcatttttagaaaatacaaaagataatataaataataatattgattatacttacatgcaacatttaaatgataatgaacgaaaacaagaaaaaaaagaaaatgaacttatgattacacaaaattataataaccaattcgaaggaaaaccaaatgttatagaaatattgacaccagatataaaaaaaaaaaagaataaaagaaagaacttaattgaatcaaataatggcatttttgatctttcacaaaatgatggtaattatatatga

SEQ ID NO: 210 - DNA, 594 bp, Plasmodium falciparum
atggaagataaagttgaagatgctggatcagcttttgttgatttagataaaatagtaaatgatgattcgaaacagttatttgattttggtgagaagaaaaagaaaaagaagaagaaagaggttgtagaaaaggtagaagagattattatagatggtacagggaaagtttttgaaagaggagctgtatatccatatgatgaattattacatcgaattcaagatttaattaataaacataacatagatttatgtatatctaaaaaatatactattaaacccccacaagtagttcgagttggatcaaaaaaagtagcatggattaattttaaagatatatgtactattatgaatagaaatgaagaacatgttttccattttgttttagcagaattaggaactgaaggatcaatagcaggagaaggacaattagttttaaagggaaagtatggacctaaacatattgaagcactcttaagaaaatatattactgaatatgtaacttgccaaatgtgtaaaagtcctaatacaactatggaaaaggatagtaggacaagactttttcatcagcactgtaatgcttgtggagcaaaaaga

SEQ ID NO: 211 - DNA, 2037 bp, Plasmodium falciparum
ataaaagtacatggatataattattttcctgatattaacttttttgaagatattaagagagctccatatttcttaaccaaattttttacttttgctcagtcctatttaaatttcacatcaaatatatatcgttttattaatttcaaatgtagtgaacatgaagaatttttaaaatattgtaaaaataatatcatgttatataatatgaaaaatcaggtccatttctccaatgtggagacaacacataacagtaataattatgacggacaaataaaggaagatgtatattgtactacagaaaataatgaagtggagaaaaatgaattattaccaagtatgaaaacaaatacatttattgaaccattagaaataaaaaataaaaatgagcatgaaacatccttaaataggaacaattccttaaatattaataatgaatttgtggaaattaatgataacaattttatagatttggataaagaatttgaaacggataatgaaagtgatctagatttggaggatgacgaaggagatgatataatagatatgtataatattaacaataataataataataatattattaatagttataacgatacataccatttagatacaagaaatgatttgatagaattatttgacgaatcatataattatgacaaagaaaatattttagaagataacagtaattatttagataaacaaaatgatatatatgataataaggataaaactttaagaaaagaaatagaaccattacaatcattatcatatgatgaagataatataatttatgatgaaaatataattcttcaaacagtagaaaatggaattattgaaaataataatgttaatttgacgtatgaagaaaataaaatatcttttgaaaaggaagaagaaacaaatgaaaatgtgttaaaaaataataccaacttattagaagtaaataaatcaattaataaaaaaaagaaaaaaaaaaaatgtaaaaaaaataatcaaataataaatagtgatataaatacaccatttttacgaaatgatacaaaaaattatgtgcaaccaattcctttgttaaaaaaatcggttcatagaaatatatcacatgaagatgaaattattttaaaatttatatctgaagaaaatttcagaagatatgaaaaatatgttctagatttcttatctaactactttgaaaaaaacgaaaaccatacaatgaaaagtcaagagtcctctcaagtgattgaagaggaacatgtagaaagttcaaaatgtgaagtaactaatgaagatgctcctagtgacgaagatatatcttatgaagatgattttgaaggagaatttgtaaatctaaaagatcaagaggatgaaatacatatgtttttagatgatgattttgagggtgaatttgtatatttgaaagatgataaaaatgatgaagattatacatatatggatgattatatggatggtaaatattcaaatgtcaaacatcaaaaagatgaagaacgtatatatataaaagatgaaaaaaataaacaagagattgaaaataataaaaataataaaaataataaaaataataaaaataataaaaatacctataaaaaaaattctgataaaaatgataatcctcgtaatgatttaaaaaaatatcgaatgaaagttaaaaaaaaaattgtaaaaaaaattaataaaaattcaaatgttaaaatatacaaaagttcaaaacatgtgaacgaagtcaataataatactttaacaaataataatgaagtaaaacaaaacaatgaatattatgaatctttctttattccaaaaaatttaacagaattcaatttcaaagataatgataaacaattatattatttaatgtcattattaaatgaaatacatgatattttttacataatgttagaacaatttaaacgaaaagaaacaaatgacgaaaatagagatgatcaaatatataactattttttaagatatcctgttgtgcgtacgatattgactcaatatcgaaaacaagttttaaagggt

SEQ ID NO: 212 - DNA, 1992 bp, Plasmodium falciparum
atgaaccttagtgcgaaaatcgattcaaatggatataataataatatagtagaaaaaaatgatgataaaagaataggtagaattatgagcgatgatgaaaatgaaagaaaggatataatatataataatgagaagaataagagaacgtctgaaataaaagttcttaaaaatgatatggataataataaaaacgacaacagtattcaatctaagttatcttttgatataaagaatgtattaacacatgcatatttaccaatatgcttagaaaaaatgaaggagggagaatatgtttataaatggaataataatatatttcaaaagaaaaccttaaaatttttttatttagatgttaataattattgtataagatggaattcaaaaaagaaaaaattaagtgaaaaaaagaacccatccttatatatatgtgatataataaaaatcttagatggttcagaatctttatttttcaaaaagaaagaagatgataagaatttatctattgaaattataagtacacaaagaaatttaagattaacctttttagatatacaaagatggaaaatgtggttatttggtcttatgtattatcaatataaattagttaataaaggaaatgggaaaaaaaaaatgaaatcctttttatatgaaagtaataaattatatgataattatatcatatcaggattaaaagatattaatgcattaacattatctcaattatacattatattgagaagtcttaatatatatttgaatatgcaaatattatatcattatttttctatttataaaaataaagctgttataaattatataggttttacgaaaatattagaacatattttctcaaatacacatatttcgatatattttaatgaatataaagataaaaaatttaattatatagataaaaaaaaatttattgaattcttaatcgatatacaatgtgaaggcaagtgtgaagaatttatatttaataattattatcaaaatgataccaacccaaacttaacgcgtgagaaaaatacagaaaaattagaaagagaaaagaaaaatgatgaagatgatacacattataacttagatatgatgcaatcatctgcacataataataaaatttataatgtaaataatcaaatggacgacatttccataaaatacaaaaatgaagatgatgtaaaacctaaacatatatttaataatgacaataaagaaaattgtaataaggaagaaaataattatagtaaaagtgaaaataatacatatttcaataatgataataataataataataaagtaagaaatgaagccattattaataattatgattgtaatattattaaaaaaataagtaaccaatatataaatcaggatgatataaaatataatatggatatatccaatacattaatattctctgataattctataatacatgatgaagattattttttaatattggatatattaaaaagtaagtacttctatcatgatcaaaataaagtaggtaataaaaaaaacacacatgataataattataataattataataataatagtgctaatgcatcatgtcaccataatttaaaagatgaaaaagaatctaaattaaacagtaataataataataacaataataataataataatgtagatacttgtatcaatgttattaataaaaatataccaaatatatatcccataaaagttaatgttatatataaattattaaatattattaaaaaatataatatcccatttgttataaataatgatgataatcaatatttaactgaaattggtttagtttatttcttattatcaaaagaaaatagtattatgtgcccagagtatgcaaaggtatatcaaaatatgaatttacccttatgtaattactggattaatagtagtcataatagttatttagctagaaaacaaatatttagtacaagtaatatagaacaatatatatatatattattagatggt

SEQ ID NO: 213 - DNA, 2214 bp, Plasmodium falciparum
atgaatcgaatattttatttttgtttgtttactattttgttttggttatctcttgtatctggtgaaaatgttaataataaaaactgtaatgagaaaaataggaaagctattttattagctttattaaaaaattcattagtagataataaggattataacaatagtgaagaattaaagtatgcattggaacatatccagaattctgaattatatccaaaggattcgaaaaaatttgacaaatttattgatgaattttttagttattataatattcatgtaaattttactgatgaagaaaaaagaatattacatatatcaggtgtcttcaaagaattttatgtagatgtagataatttaaataaagatgaaatgaaagaatattttaagaaaaattatgaaaaaggtctttctttaattaatttaatagttcatagtaatttaataattcaacaatttgatcatgatattatagataaaaaaaaagtacatgaacaaaacacaaatacaaataaaactttagaatatatatctgataatttaaatgatctaattaatttcaaaaatattcatttaaataataattccactggagattttattatcaaattatatacaaattatgtgaattatattaacccttatcaaacaaaccctttgccaaatacaccccactattacgaacataaaaattttcatacgaaagaacattatatatacgacgaggaaatagttaatccaaatatggataatataaatacacacactgaagaggataatgtgtatgtatcagctacaaaaggaaatcaaaaagaagaaactgaaaaaaaagaaaatcatgaaaataataatgcaattaatcctaaatatatgaattatgaaacatattataaaaaaatattcaatgccatatttgaacaaatagataaactaaataaaacactttttgaaattaaaaataaaaataacagtgaaacaaatgaaaatatttctgaatcaaattctggaaatccagaattaaacaatgaaaatagctattctgtaaaattgtccagttcgtcacccaattcaactaacaaagaatctttaatctttccatatacttattacaatccatattatatgttcagattaactaataattttaaagaaaatgatgaaggtttaaaaaatgaaaacaatatcaacaataatgaagataaccaaaatgataatatgaacatagttttggggaaaatacataatattttaaaagattttaatattaatgaaaatattatgactaataaaatgtcagcaccacttataatgacaatcattttaaattttttcaaaaaatatatggctgaaaataaatttaatcttccaatgtcatcagaggttgaaaataaaattaacaaatccaataataaagcattattacaacaaagtaataaagatacaccaatacataaaaaaaaagaaattagaaataaaaaaatacaaacaaaagtagacgtaattgatgaaaagacaaaaaaaaaaattgcaaatactatttatgtaaatgttggacaaagtggtattaatggattttttaatttttttgattttagagaaaaatctatagatagcaatatctttgatttgttacatgtaatggaagatatgaaaatatttgatattttccaaactattatatttattcaaaaatttacagaaaatgtatgtgcatcttattgtatgaatattaccgatgtgctagaattatcacactatgatatgatattttatgataaaatggttttccattttagtaaggatggaatgatgataaagacggataaaaaatatttatataatttaaaagaatttgaaaatatacttaatttattaaatataaatgctaataccatagcattaaattgtacttgtaaattttatgtagacgttaattatacatattctgaacaatataaaatgcatttaaaaggatatctccataaaatgaatgaatttgattatattaataatttttcagcatcgtatcttttaaatcaattaataattttccaagataaatttaattatattaaaatgaatggaaaactacctattgatgatccaaaaaatatatataatatgaataatgtacacgatacagcatattatcataattctagatatttcccaaccaaagatatgccaagtttagaagacaatttttatgaacacctt

SEQ ID NO: 214 - DNA, 2208 bp, Plasmodium falciparum
tatttcccaaccaaagatatgccaagtttagaagacaatttttatgaacaccttaaatatcctgatataaatactattcatatttattataatgcttccccagttaaattaaatgaagtgaatgatttaaaaactataattattgatgaaataaaatcgaaaattttctatattaattcttatagagtaggagatcaatttttcccaacttatagtaatttaggaaaggatgatcatgatttagaacattcagcaaaaaatttttataacatatctaatgagaatggcgataatacattcaataataataacaacaatatggataacaagaaacgtatgtataattataataaacataaagataatgatagcagatatacagataattctaacaaaaatagagataattctaacaaaaatagagataattataatagaaacaaagataaaaataacacaaatagggataattacaacagatataaagataataattactattataataatagtgataataataactataatgaaagaaaacgctatattaggaaaaaaacatacaataaattaagttattttaatttaccaagcttaaaatcaatatataataataaaattaagggaaatagtgaagaattctcatttgataatgaattacctgaacaaactgaatcgtttcctttaaataaaccacaagatcatgaagcattttataatttaaaaaaacatcataccaatgtgtatgaaccaaatgatgaagaaaagcaaaatgaacaaaaattgaaggatcaaattaagattacatcagatattttatataaagatattgaagaaaataaaaatacggaagatgtcttattaatagaaactataactattaataatggaactacatcaaatacaattgaaaataataaggatagtaataaggaagcagaaaattctaacactgaacaaaatgataataataacaatgataataataacaacataaataataataataataataatgataataaggaagaggatatgaatgagaacaataataattcaaaagttacaggtgacagtgtagaaaatatcaatgaacaaacaaataataatcaatatccaaacactgaatataataccatacaaagatctattaatgcaaaatatttgattttcttttttaaaaatcttcatgtatggaaaacagatttattttgccagaatataaattatatgaataactacctaaatagtatacaatataataaaactctcacctttgatataaattatgacacaaatgcagtaactatatattttactgataatattacttatactgtaaaagtaaacttagaatatcttgtatttttattagaaaaaatatcattgataacatttgtagaagatttatgttctctctttgatactgataaaaaaagaaattataaaaatttaactgaattcttagaaaatacagaacgtataaatacatttgttagaaatcatatgatgttgtctaatgaacaatttataaataaaaataaatatgctaaggaattagcagaaatatctacatctaatctcttttatcctaaaaaagatattattttaagatccacaccttataacaatattatattagatgaaaaagatatataccaaactatttttatttatatggatgatatgttaacagaaaaaatggtaaatgatacttggattacaccttacgcctttgtagtctattcaaaatccaaaaaagacatgcaaggaaataatattaaaatcgaacaaaataagaatataaccaaatattctagaagtgcaattgataaatatgtgcattatgaatataaaagaatttcagaaaacctaaatcgcttttttatggaatcaaattcaaatgctcctcaatttaatgaaaattataaagaatatacaataattatttataatgataatccatctatgcctaatattgtacttactacaacgattaatgtattcaatgtttctttcttacaaagcataatggaaatgttattaaatattaaagccaaccaacaattcttttcttataaaggaaaattcataccaatcaatgcattcattactttagaaaataaaatcaactacatattctttaactatataccacttgaaaattatgttaataatggagatgcactagattttagaaatccatag

SEQ ID NO: 215 - DNA, 276 bp, Plasmodium falciparum
aatatatgtttaaacgttcccgtctactcccctctggaaataatggtcaaacatttaattttatgcaggaatttattacgtgagaaaaaaggcaatataggtattatttatgattgtagttatgtatgccaaccttataaaagatacatgataaaaataaaaaataacaaaaaaaaaagaagatactttaaagaaacaagtaccaaattaaaaaacgaaaaaaattcactaaatggaaaactcaatgatgataaaagattatctatatttcaataa

SEQ ID NO: 216 - DNA, 1602 bp, Plasmodium falciparum
ggttgcaataagttggccgacgcggttagtgtaacgcttggtccaaaaggaagaaatgttatcatagaacagtcatttggttcacccaaaataacaaaggatggtgtaacagttgctaagagcattgaatttaacaacaagctagctaatcttggtgcacaaatggtaaaacaagttgctgcaaataccaatgataaagcaggtgatggtacaacaacagctacaattttagctagatcaatatttcaacagggttgtaaagcagttgattcaggaatgaacccaatggatttattaagaggtataaataaaggtgtcgaaaaggttttggagtatttaaattcaataaagaaggatgttacaacaacagaagaaattttcaatgtcgcaagtatatcagcaaacggtgataaaaatataggtcaactaattgctgataccatgaaaaaagtaggaaaagaaggaaccattacggttacggaaggaaaaacgctacaacatgaattagaaattgtagaaggtataaaatttgatagaggttatatttctccctactttattaataatagcaaagaccagaaggtagaacttgataaaccatatatacttatacatgaaaaaaaaatatctactgttaaatctttattaccagttttggaacatgtattacaaaaccagtcatccttattagttatagcagaagatgttgatagtgatgcattggctacattaattgtaaataaattgagattaggtttaaaaatatgtgcagtaaaggcaccaggatttggagaacacagaaaagccttgattcatgatatagcagtaatgacaggagcaaaagttattacagaagaaactggattaaaattagatgatccacaagttgtttcttatttaggtaaagcaaaatccataaatgttaccaaagatagtacattaattatggaaggagaaggaaaaaaagaagaaataaatgaaagatgtgaaagtataagaaatgctataaaaatgaatacatcagattatgaaaaagaaaaattacaagaacgtctagctaaaattacaggtggagttgctttaataaaagtaggaggaataagtgaagtagaagttaatgaaattaaagacagaattcaagatgctctttgtgctactaaggctgctgttgaagaaggtattgttccaggtggtggtagtgcattattgtttgcttcgaaagaattagattcagttcaaactgataattatgatcaaagagttggtgttaatattattaaagatgcttgtaaagcaccaattaaacaaattgctgaaaatgctggacatgaaggttcagttgtagcaggaaatattttaaaagaaaaaaattctaatataggttttaatgcgcaagaaggaaaatatgtagatatgattgaatcaggtattattgatccaaccaaagttgttaaaacagctatatcagatgctgcttctatagcatcattaatgacaacaacagaagttgctattgttgattttaaagattccaaaaatgaagaatcatcacaacatatgaattcagttaattctatgggtgatatggggggaatgtattaa

SEQ ID NO: 217 - DNA, 2997 bp, Plasmodium falciparum
atggatgtacaaaaaaaaaaatgcaaaacgtattatttgatagctatactgatatggtttatattaatatcagtagtattatccaggggtgaaataataaacaaacatgttaaaaaaaaggaagggaattataaaaattatgaggacctcgactcggatataaataaaaaaaataattattatgatgacaaacataaaaataagaggcttctaagtgatactaatataaataatgataataatataaataataataataatataaataatgataataatataaataatgataataatataaataatgataataatataaataatgataataatataaataatgataataatataaataatgataataatataaataatgataataatataaataatgataataatataaataatgataatataaataacaataataataataattctctttataataataattctttttataataataattccttttataataataattctctttataataataattatctttataataattacacgcaccccaaacaacaagatggtcataagaaccatccggaagaaaataaaaattacacatatgatgataaaacaaaatttacaaagtttaataaacacaaaaatgaagaattattcacccccaatccccctcttaattatgaaaagcaaacattatcaaaccatcaaaacattaattttgattctactgtggaggaggggaataaggacctgaacaattcaggaaatattataagtcaagaattggaaaaaaaattatcaacagataatcataaggaagaaggagaaaggaagaaagaagaaactaataagaagcatgatatagatacaaataatatggatgataatgaagaaaaaaatatttatgaatattttaataaaaaaacaaaagacaatttcgatggacttatattaaatatatattttacacctaataataatttatatacaaaagtaaaagtaggtgaccaagttttaaagttatcattaaatagtagattagaaggcgtttatgtgtttatgaaagattctcctgcatgttatttagaagatgatgataagagaacttgttataatcctcttatgtcaagaaattctacatggtgtaacaatgatttaatgtgtctccccgctattctaaccaaaccatatgaatgttatgaggatagttctttgaatttagaaaacaaggttcaatatcctaatgtgtattatgattctctaaaatttaacgagactcatattgaagggtcagatgatttagagttcatagacctagtgggtgttcagacaaaatatattagaaataaaaagaagaaaatggatgttaataaaatgatgagtaatgaaaataaaagtatggatcctaaacatgtggaaaataatttacagaataataatattttaaaaagagataatattatcataaaaccaagagttaaattatcagaaaattcaaatcttcttttccaaggtgtagatataaaacttgtagtagatatgactttttataatgactggaatttatttaaagatacggatggtatgtttggtttggctgggaaagaattgagctgtagaaatataagtgcatggaataatattttagaaaacaataattctatatttgctttagatataaatttgccaaatgatgctataaaaacataccccaccccacctgttaatagtgtaggtacattatattatgaatatgatttaaaaaaaaatggagataataaaaaatcgagtgatcaaaatataaataatgtaaaggataatatgatagataacaaaaatgttgatgtgggggttcaaaatataaacgaatttgagacatctagttctgttatacatataggtaattatagtaaagaatatggaaacattatttggtcagaaccacgagaaagaggaggtatattttcagattcttttattcaatttactatatataacctagaagtatgtaataaaaatatatttggtaaatatagtagtaactggcaagccataattgatttgagtagccaatgtttagtactcccaaaaatgttttggttaagtcttatggagtacctcccagtaaataaggatgacgatagatgtataagaaaaaatatgaaccctaataataacaacaacaacaacaaaaacaatgacaataataataacaacaacaaaaacaatgacaataataataacaacaacaaaaacaatgacaataataataacaacaacaaaaacaatgacaataataataacaacaacaaaaacaatgacaataataataacaacaacaaaaacaatgacaataataataacaacaacaaaaacaatgacaataataatggtgataatgtagattatgaagaaaatagcttacccagaatgtgttctgttgatcataggaatagacccttaccaacattaaaatttttcctatcggacaatgacatagtcagtgataataacatttatagttctcctgaatcggaaaataaagggaagaatgaaaagaaaaatgagaaacaagctatttatataccattagataatttaattataaacgataaaaagaataatcaaaattatctatgtgttatacctgatgtacatgatggtaggtcaaccgagaatagcgctagaacaacaaaaccattaattaaatttggtacttatgttttaaataatttttatgtagttgttgatcaagaaaattataaagtaggttttgcaaataaaaaaagctttcatacatcaaatgaaaaatgtacacaaagaactcaatgtataggtgatcaatattatgaaccagcccttaatatctgtgtagatcctgattgttctatatggtatttttatacattgaatgatcaaaccaaaaaatgtgaatccttatcatcaagattttatgtctttataataatcattttgacattattaatactggacatacaatca

SEQ ID NO: 218 - DNA, 1779 bp, Plasmodium falciparum
aaaaaaaaatttataacacaattatcatatgaagaatttaaaaatatgaatttcttatattttgataaagcatatatagatttaaccttaacaaatcctatacggtatagttataatgatcaagtagaaaaatggctaaatgatttcctatgcctaaattgtaatgaacctacaaatataaaagataatatctgctccccatcgaattgtgaactatattttgtaaataaaaatatttttaaaaattataatagaactagtgaaatattattaaaaaaaattatgacattatttataacatctcattataaaaatacacccaatgatattattatgatattggattcgcaacagcaccatttatttattttaataaataaaaataataatcattataataataataatatattggaagatcaaattgacgaactagatatttatggagtgttacattgtgcaatagatggtatcataaataatggaaacgtcaaaaaaactgtaaaattagaagatattattcatttagtaaaaaataataatacgcaaaaggaaaatcctacattggatacaaaggaaataaatgattcaaatgatcaaaaattggaaaagaaagaaaatataaaccaaataaatagtgataatcataaagaactcttaataaatgaatatgaagggaatttaattccttatattatcagtgattattttaattattatttttataattatatcggtatacgtattgtacgtatatctatccatccatctatgcaaaacctaaattatggatctgaattcttaaaaaaggtttgtaattattacaatgaatataattcaaaacaaagacacgacaataacacaaaacaaaaaattaaaataaataataatgatagtaacaattgtggtgatagtaacaattgtggtgatagtaacaattgtgatgatagtaacaattgtgatgataatgtgaaatacagtgaaaatatcatattatttaattgtaatggtaaaaacatttattttgataagaaattaaaacagattgattatataggtacatgctttggattaaccaaaggacttttaatcttctggcaaaaaaataaatttatccctgtttttttaaaacaacaaaaaaatgagataacaggtgaatttagtgttcttatgttaaaagatctaaatgaagatcttaaacatatcatagcaaatttttatacagattttgtaagaagtgttaccaaacttttaccatattcatttaaatatatggaatcctttattgtttttaatttattacataataataattattctataccattaaaacaagacgatgctcctacaatagttaaggatcataataacacagatcatacatataaccataatggacatataaaaaataatctgcataataatcatttttattatgataattatgaagatcaacatttatccttttataataataatctcataaatcaacaaaccattttctacttttttcatactaatgatatatgcagattaaaaagattcgttttagaaggaagaaatttctatgaaatcctatacctattatcgaccatagcaaacctaatattatttaaaaaagtaaaaatagatttgagctttttagaatatacaatattatatgctgtagcatttcaaaaaaaaacacctaaagaaatatcagacgaaatcaaaattaacgtaaatcaaacaaatgcaatctttagaaaaataatacaccgattttataattacatcaag

SEQ ID NO: 219 - DNA, 2112 bp, Plasmodium falciparum
aaatataaatatctagaatcaaaagattatgataaattatgtaaagaagtacctaagtttttttatcttaatattacatttcgaaagaaaacagatcattcaaataatacatattataatgaaaataattttaaacatgtaatagacagtaatgttttgcaattattaatttatccatctttcttttttcaaaataatctagataacgatttaataattaaatccaatggaaatttacaaaaaattaaaaaaaaatcaataatgttttttggtgatgttgataatagtaaagttatattacaaatagtatataataatcaaatattcctttctaaaaaaataaaaataaatcaagtatgtttaaataaaaaaatcatcttaacaagtaaaaataaaaaagaaaatattttcttatctatgaatattacattaaatggtaatatctataatacaaaaacaattactattaataatagatatacaattattaataataccaatcgaactttatatgtgcaagaagttaataaagatttcaaaattattaaaaaaaaggaaaaaaaatatatgacgtattcattttctttagaaaatttacaaaatcaaaataatcattcaaatgatgaaaatatggaaaaattatatatacctagtagtaatgatcttactaatataaaacgtaattataatcaaaaagaaaaaaatgaaaaaaatgaaaaaaaagaaaaaaatgaaaatttaaacaaaattacaatcaataaacgatcagatttaacgtatgagcacgaaaatgatgaaacaaaaattatggatacttgtgaaatttctgataagaaatatacggaaaaaggtatgacaaaaatatgtgaatttaataaaaagcatataaaatataataaacataaaaaatataacgacaagaaatataatcaaaaggaaaacaataataataataataatactacgagtagtaataatagtaatagtaatagtaatagtagtaacaacagacctaatattatttcaataaaaccatatgaatctttttattatcatcctattaacacaaataaatgcttcctaactttttcttatacaaatattatggaatgtaaaaatgataagaatttttatagaagaagaggtagctatgaatttacacatacacaaaatgaaatcacaaacttattcaataattatttaaaaaaaaaaattatgaaatctcaaaatatatctataataaatgataaagaagaaaacataaataataatgtacataaaaatcaagaattctataatttattttatactagtcctatagaaatcgaaaaggtaggtaattacaaaatttttcacaagacagtacataaaattgatgttacgtacaataatgaaaaagacgcaaccgacgatcaacctacatatgaggatgatattattcaaaaggaaataaaacaacaagaaaaagaaattgaagaagaaataaaaagagaaatagaagaactagaagaacatcgtgaaaaggaaactattattgtattttcaaatttgaaagattcatatgaaaaagaaatgcaaaaaaaaaaaaaagatcgacataagaaaaataactttcttaatataaactctgatcatattaatgataagaacattattaattcttataaaaatgaacaaaccactgaaatgatatatatacaacacgactatacagataatatacctgctgacgatgagaaaaaaagttcgcataatgaaactatacttatagatgatttaacattatttaataaaaataataaacatagtattaatgaaagggaaaataaagaaaacatatttaatgaaacggttttgacagtcgataataatgatactgaacatataaaaagcgactatgtaaatataaaaggcgattgtataaatataaaaggcgattgtataaatataaaaggcgattatgtaaatataaaagataattgggtagatataaaagataattgtgtaaatataaaagataattgtgtaaatataaaagataattgtgtaaatataaaaggcaattgtgtaaatacaaaggaggattctcataataattatcaacagaatgat

SEQ ID NO: 220 - DNA, 2154 bp, Plasmodium falciparum
aaaaaaaacagatatgatgatgacaaggacattaacgattacacaacaaaatacaacagaaaaaacaacaaaaaaaacaacagaaaaaacaacaaaaaaaacaacagaaaaaacaacagaaaaaacaacaaaaataatgataataacaatattaatagtatgtatggtagtcattataataataattatatttattataacgattattattataataataattacatgtatcgtcgtagtactcttaattatcattattatgaacaaggttatgataaatacaaattgaatcgtatatataataataacccgaaattaagaaaaaataataaagaaagaaaaaataatatacaacaaattaattatacaaccaaaaaagaagacaaacataatttcctaaatttaatagatcaatccagggaaagctcatttttagatgagaaagatgattccttaaccaatgatgataaatatattatgcatctactaaatgattataattcttcttatcaaaataatttattaagtgaagaagaatcttttgttaaaaggaatttcagctggaacttttttaaaaaacaacatacaaataataataataataattcggatgatgacaattattttaatgattcatataataacataaaacatgaaagttcggggaacttaaattatatgtacacaaaaagtattaaaaataaagatttacataaactagtaattgatgataataactcttctatgaattcattcctttttaataataaaaaaaatgttatcatattagatcaagtttctaaaaaaaagaaaaagaaattacaatatatcaaaaattttgaagaaccacaaaagggacatatatatatggatgatgacatgtatatagatgtagatgtagatctaaattcttatgcggaaggaaaaaatactacaaaagatacatccaaatatccaccacattttaaaatatcatatgatgaagaaaaaaaaaaaaggaaaaagaaaaggctttcaaccggtagtaataataatagatacaaaaatgatgcggaaatattagatatgaatccaaacaaaaaaaacaagaaaaaaaataaaatgctaaaaaataataataataataataataataataaaaataaaaaaaataaaagaaataataaaagaagtggttgtactaaaatgttcagattttttaaaaaaataggattaaatattatttatattttttcaaaaactaagagaatatgtattggtatatatgtattatttatacaattaatattatccttattattttctattacactaatattacaatctttaataaatttagtagaaaaggtaaatataaataatgcagataatgtgtttttaatatttaataaaaaatatgaaagaaaaaaagtagtggtatttaataatatagaggaatataataaatttaatattaccaaattattttattattatattagtatatatatgaatatagtgaatttcttatattataatatgttatataaaatgaagaagaaaaaaaaagatttatcgggagaagataaaatttttatgaagaaattaaaaatcaatttaaaaaataaaagaaaattttctttctttattaatttctttttaaatatatttaatatcatcaatatattattatttggacatatagttttcttacttttatgtttattaacaatgaataatatttttcaaaaaatacttacagcatgtattaaattagtatattaccaaagaaataaaaattatctagattttctcaataaaaacagttttaatcatatgaatattataagttatattaaaattaatcaagttataagtaaatatgtactattaaaagaacccttcaaatatttcttatctcatcaagatttcttggatattaaagcacctaaaaaaagaaattattttgtatataccaaagagctcttcttttatatacaagaaaataaaattgtattcttatttagaaaaaacgatatgaaaaaaattgacattattatacatactataaataatagtttcgcaataaatagttactataagaaaaagggtagtaagacagccaaaaaaagtagatccaaaaataccccatcgaattatactcttaatatggaa

SEQ ID NO: 221 - DNA, 2328 bp, Plasmodium falciparum
gaaaatatcatcaactatcaaggcatgtataatatgaataatatttataatacaaataataatatggaacaaaataccaataataataatatgtataaccataattcatatgccaattataaacacgaacacttatcattgaatgtctacgaaggaccattagagaaaaataacgaatggggaaaaaagaaaatgaataaaaaaaacaaccaaagtggtatgaaccaacagaatgttatgaaccaacaaaaagttatgaaccaaccaaatgctatgaacttccccaataatatgaaccaccccaataatatgaaccaccccaataatatgaaccaccccaataatatgaaccaccccaataatatgaaccaccccaataatatgaaccaccccaataatatgaaccaccccaataatatgaatcacctcaataatatgaaccaccccaataatataaatcagccaaatttaataaattatcaataccccatgaatcatgtacagcacatcaatcatcctgataatagaaacaaaatgaataatcctaatattcctaattacccaaatgtcaacgtttctgctcctgaaacaaaacaagacaccaaaataattcctaataaagaaaagaaaaaaattataaataatgaaggaacagtacttcaacccttaaaaaataatgtagagcataataaggcgaataatttattaacttctaaaaagcacaacacgaatgtaaataataagaaaaaatctaagaatgttcaacaagaaacccccataaagcatcttccgaatgaggaagaaaatatgaaacaaggaaaaacaaaaaacagcaacaacaaaaacaacaacaacaaaaacaacaaaaacaaaaacaacaacaacaataataataataataatttggagagtatcacgaaaaacaaaaataattcacaatacatttcaacaaatgtagaaaatgaaaatttaaataaaaatgaacaaaagggaaaaatgaacaaaatgaaaacaaagacacaacgttttaataaagaagaacaaaatgaaacgaacaattttacaaataataataaaaaaggatctaatcgttatcaacaaaataaaaaaggacaatttaaaaattctaatatgaactacaattcatggataaataatcagcaaggaaatgatcaacaacatttgaatacaaatgtagataaggataaaaataaagattttgaagtgaatcatgaaattcataagtttattgattattgtttaaaaaattatggaaatagaaatataatggatgtcttaaatgaattctcatcatcaaatggaatgaatgaaaattttgatgaattgaaaaatatatttcaaatacaattaaatgaagaaaattttaatgcccttgcagcattagaaaatgaagctcaaacaaataaatttcattttataaatgaaaagaatatgaatgaaaccatagaaaagggtattgaggaaatttttgaagatacaaataaggatataattgaggaatatgataaatttaaaaaaatgttgagtgaaagcatggatgaaagttcaatgagaaaaatacaaatagaaaataaagaaataagtgacaataaagaaataagtgacaataaagaaataagtgataataaagaaataagtgataataaaaaaataagtgataataaagaaataaacgataataaagaaataaacgataatgaaaaaataaacgataataaaaaaataaacgataataaagacaacaatgaaaagattgaagaaaagaaagaacttgttgaaaacaatacaaaaaatatgtttgaagaaaataacaaaattaatataaccatacccccaggtttaagtttaccagatattaacagagctttattgcatagtgcttatttagataatataacagtagtaaaaaagtgtcttgaaaaaaaagcagatattaattatttagacaaaattggaagaagtgctttacattatgcatgtgcaggtggatattttgatatttgtgaattgttaataaaaaatggtgcaaaagtaaatgtatctgactacaaaaattggacacctttacatattgcaattacaaagatgcataaagatataactgaattgttattaaaaaatgatgcaaatatacatgctttattaccacattctttatcacctaatagaggaaaaacaaccgctagtatgggtatccattttgctgctattaaaggtaataaagaaataaccaaattattattacaatatggagctaaaattgatgacacagatttatctaatagaagtgctcttcattatgctgta

SEQ ID NO: 222 - DNA, 1542 bp, Plasmodium falciparum
atgaacaaaaaacataataacagcgcacattttgaaaagttcccatgcacaactaatattccttacagtgttcagaataacttcaatttagaaaaagatacattaataaaaaattttgaagataagaatgaacatataaacaaaaagagttttaataaaaatttgggaaacttaatatataatatctcaaaacttatattacataattcaaacaataacaattctgacggtaataatattaatagcaaaaatagtgatactaaccataatataacaaataacaaaagctcgaataataacacaactaaccataatactacaaatcatagcataaccaataaaaatattaccaaccataacattgccaaccctaataataataatcctaacgataatcctaaaaataattataaggataaaaacaacaataaaaacaacaataaaaataacaataaaaataataataaaaataataataaaaataataataaaaataacaataaaaataacaataacaataaaaataaccttaatagtaatattacatgcagtgaatacaatttactgagtacaaataaaaaaaatcaagacatcacacaagcattaggggatcatataacatcaatcacaatgaataatatagaaagtaataactttttagttggtgatgaaaataatggtttttatcaaattttaaacaatgtagattataataaaaaggagaagaagaagaattttataaacaacaaatgtaatagtaatatacatatgaataatattgaaaaccaattatataataatgttaataatataattccaatggtttcaaaaaataaatataatttatttacaaataacgaaaattataatcaagagaatgataaatataatgaaaaattatttaacaattcagttaacttttgtaatattccaaattatgaacaagaaaagaaaaaaaaagaaatagaaggatcagaaaattataaaatgaatgatgtatctcaacttacgcaaatgaattatatgtatagaaatatagattattctaaagaaaaagtagaagaagaatcttttgaaaaaaatgttgtagattttgaagaaaatgtacctgaattcatgaatgaatataaattatataatgaaaaagtgaaacatgataatataaataatcaaatcattaaagaaataaaaaaaaacaaaggaaattataattttaaaaatattgtaataactaatattttccttggaaatatcccaccaaatatcactgaagaaagattaaaaaatgtattagaaatatttggatatataattcatattgaatataaatggtctattgataaatggtcttatgcttttgtatatttcattgatgaaaaatgtgctattaatgctgttaattttttaaatcagaaaaagttttttgataattcacctaatcataaattaatatgttttattgtttccaaacaaattcctcatcaaaataccatgcattatagtaaagaaaatttctccttgttaaaagatggaccaccaggc

SEQ ID NO: 223 - DNA, 2742 bp, Plasmodium falciparum
ggcgcaaatttatttttatatggaatacccctaaaatggaccgaattaaatttaatacagctagtaaataaatacggacatgttgtaggtctaagaattccgtatatcagtaaagagaatgacaagaaacaaggtaatagaggttttggatttgtttcttatgataacaaaaaatcagctatagaagcttttgaagaattatcaaaaatgtatatacatggaaaacttttaaaggttcagttaaaaaatggtgaagagcatttattacctgcaaaattaaaaaacatttataatacaaataaaaataaagcaaaagatgttacaaacctgaaaaccgcacaaagtttagttagtacaacggatactttaaatacgtttaattctttgacttcaaccgaagtaaaaaagaaacttaaaaataacaagtgttcaaataataatatgaaatcttccgtttttatttcaaataaaaataatataaataataataataataatagtactatatataataaagctaataatagtaatactcaacatctttcaattcctgatacgaatagctcaaaaagtttattagaaaacgaatacaaaaataagtttcctttaaacaattcgaataattgtgattccgttcctagtatatatccaaagatgtttacaaattattcggataaatatgatctaaatgttaccactgaaaagcattttcctatatatgcatctaaattaccacaaaataacggcgccaatttgtgtttatcaaaagaattgaatacaggaggagaattttgttcatatactattaatgaaaataactcatttgaaggaaaagatactaataaaaagaattgtggaaaaatgttaaaggaagcagatgatattaataaaaatgaaacattttttttaattaaagaaaacagagaaaataaatatagtaataataaagacaataaaggggaacaaataaatactcaaaatgatatggcgttatataataatatggaaagtaatatgataacttataaaaatatggaagaaaatatggtacctaataaaaacatggaaactaccttttcatactttaatatgtgtgataataataataataataataataatagtaaaagtaattatagtgactccaaaaaagtaactccaaatagtaatagtaatagtaatagtaacagtagtagtagtagtaatagtagtagtagtaataataaccattttgaaaagagatgggataaaaatacctggaaaaaaacaagcaatatacaatcagtagaagaaaataacaaacatgataatacgttttttaattttatagataaaatggatactacaagatgccaaggaggaaatataagaaataataagtattcaaattataattacatagaagagaataattctgaaaagaatgaatcatctaaattaaacaatttcaaaaaccaatttggtgcaaactcgaaaaatttgtttttttttaataattcaaatgaatcagaaaattcaaatattaatatgtataataaattttttgttaatgaaaataatttatattcagtagatgaaaaaaatgaaagacaaaatatacctacagaaaaaaatattgagctaactataaataggataaggaatgaaacaccatcatcatttaatgaaaagacaaaaaatataagttcctttttaaatgatatatggtataacaatggtaataataatattattatgtacaataaaaatagtaatgtacatgataataataataataataatattattcataatagtaatagcatgcattatcatataaatgatatccataccaatatgaaaagagataactacgagaataataataagtggaataataatataaagggaaataattcaaatgaatataattataaaaaagaaaacaataataataataatatgttttattataatataaataataacaataataataataataataataataataataataataataatagtgagcatatatctgaaatagatgttaaacaattaaataatattatggaaaaaaagaaggaatatttaaatgctgtttctaaagaagaacaagaaaatttggatgataatatatccaaaaatgaatatatgaatgataaacaaaataaaacaacacaatattttaaaaatatgaaaattttatttacatttttaaatatatatgcaaaacagaattcattagatatagatgatttttttaatgatgaaaaaaatatgcacttgtttgaaatgttaattaataagaaacaatttgataaaaatgatttggaatatttatttaatatgttacaattaaaaaataatgaaaaggaaaaaatgaaaaaagaaatattaaatcataatgaatatttcaaggaaaattataaccatgataaaatagtatatacaaaatcaaataccaatatgcttaatatgaattataacactcccaataggtaccagcaaggtaataatattaatactaatcctaatgttgctcaaaggaatgaaaacaactattatgggaaaaataatgatgcaccatatgatttagatataaataacataatatatacaagtaataattttacaaatttagataaatatgaaaatagcaacttcaatatggaaataaaaaaaattaatgatatgaatgcatacgataataagtttataccaaatgttcagaataatgtcaataaatatatgtaa

SEQ ID NO: 224 - DNA, 720 bp, Plasmodium falciparum
cagtcgtccaaattaattggtatttcaattttccaattatacacaaataaactcaattacaaaaattattccatggtcgttatcctatttaatattttacttaaattatgcagttttatttttctgtataataacaagaatacctacgtgagtccctttttatttttattcaatataattgttcagaatatttctatcaaaattttatctttacccatcttattattatgtatagaaaaagctcctttaagtttagaatctaccataataaatatatatattttttgttttaatttatcaaatttgattagtaaaagatatttcatgtggaatattattttacatgtgtcaaagaatgtgttcataattttacttctttcattcctaacaacctgtgctagcttattatattatttccacatctctttagataccttaaataatatgaattcatcatcattatatttagatgaaaaggaagatgtaaacttgaaaataaataaaataccccaaaaaaattatttgcgtgatgaattatttcttaataatgaggaaaaaaaaaaacaggttaaaaaagttgttcgttttaaagaagattcaattataaagacgcaaaaaaatacaaatgatgaaaaaaagaaaaaaaacaataatttatttaaaatatcatctgattataattcagatagtgatcagtggttgataattgatagtttaaag

SEQ ID NO: 225 - DNA, 2892 bp, Plasmodium falciparum
gaggaaagtaaaatgttttttaatatcgaaaatgaatataaagaaatcatacatagtgcagcagaacaaaaaaatgttttacaagtatgtcttaatgaagatttattctatttattaagcaaattttttaaaaatattgaattgtgtgaaaaagctttaaatgattatttagatcaaaagaaaaaagctttcccacgtttttacttcttatctaatattgctttgttggatatattaagtaatggaaaaaaccctttcaaaatactcccttatataaatgatgtatttaatgctataaaaaccatacaatttaaggaggaccttgttcagagggggcctgtgtcggaactaaatgaacaaaatgaagagaatgatttggtaaagaatgaggaaagaagtgaaacccaaaaggaccaaaaggaccaaaaggaccaaaaggaccaaaaggatcaaaaggatcaaaaggatcaaaaggaccaaaaggatcaaaaggatcaaaaggatcaaaaggatcaaaaggatcaaaaggatcaaaaggatcaaaaggatcaaaaggaccaaaagaatgttaacacagatggtaaaatggatggttatacagatgacaaaatgaatggttatacaaatgatgcctcatattatgggcaagaggaagacgaaacatatgagggtgaaaataaaaaatgcaaagatatcaaaacgtgtgaatccaaagattatatagctaaaggtgtttatagtgtcgaaaatgaacatttagaatttttgaacgaactggttttaaaaggaaatgtggaaaattatttgaaagatttggaaactcatttaaaagtaacaattagaagtatattagaaaatgcaaaaatatgttcagaaaatttagatgaacagaatagagatgagactatgataacgaattatattagtcaagtagtatgtacatgtaatcaaattattgtaacagaagaaataaataaatgttttgatgaattagaaaatggaaatgaatcagcttttgtagattataaaaaggtattaattgagagaattaataaattaataaaattagttgaaaaaacagatgattataatataagaacgaaattattatctttaattatattagatgtacatacaagagatgttataatatcatttataaaaaaaaaaatttccgatagtacttcttttgattggcaagcacaattaaaatattattgggtttatgataaaaaaattaataattatacatgtgaaattaaattatgtgattttaaaacgaaatatctatatgaatatataggaaattcaggaaaattagtaataacccctttaacagataaatgttatattacattaacacaagcattaaatttaatattaggaggtgcaccagcaggtccggctggtactgggaaaacagaaactacaaaggatttatctaaagccattggaatagctatatttatatttaattgtagtaaccaaatgaattattttaatatgtctcaaatatgtataggtttatcgcaaacaggagcttggggatgttttgatgaatttaatagaataagtatagaggtattatcagttgttagtactcaaattaaatgtatatttgatgctattaaagagaaaaaaaccatgtttcattttattgatgatgaaatagtattaaagaaaacatgtggattctttataactatgaatcctggatatgcaggaagaaccgaactacctgaaaatttaaaaaatttatttagatcatgttcaatgattgtacctgatatcaaatttatttgtgaaaatatgttaatgtcttttggatttattaaagcaaataaattatcttataaatttgttgagttatatcaattatgtaaagaattgttacaaaaaaatattcattatgattggggattaagagctgttaaagtagtattaatacaagctggaaacttaaaaagaaaatatgctaacttcgatgaagaaattattttaatgaaagctttaaaagattttaacatacctaaaattacatatgaagatatacctatatttttaggattaattaatgatctctttcctaatgttaattgtaatatattcgatgaaaaagatcaagaaaaagaaaatgattatgatgaagaacataaacaagaacaacaaacatatattatacaagatgaggaaaaaaaattatataaaaagaaaaaaaatattcatcataatatagataaatataaaagtagcatcacacaaaattttacaaatgcaaatgataacaaaaatcatttatcaattaataaagataattatgaaacgaataaaaatttactcacacattatcaacatgatatttgtgaagatatctcccaaatagataaaactaaaaaggatgtacaaatatacgatgaagcacataatgaaaaaagtgatataaatgaattaaatcaaaaaacaaatataatagctaatcaaaatgttaatgaaaattatataaataataaagaatatgataaagattcaaataaaatagataatttaaaacagaacaaatttatgaacgaagaaaaaagaatcattattcacaattttgatgatgccataaaaatatgtttgaaagaatcaaatttacaaatagatgataatttcatacttaaagttaaacaactcaaggatttaatggatgtaagacattgtgtatttatattgggagaagacgggtgtgggaaatctagtgtcatagatattttaattaaaagtttaaataaaataaatgaaaaatgtttatatgaaattataaatcctaaatctattgaatcatatgaactttatggatatttaacaaaaaacaatgaatggattgatggtgctttatcatcaattatg

SEQ ID NO: 226 - DNA, 2892 bp, Plasmodium falciparum
ggatatttaacaaaaaacaatgaatggattgatggtgctttatcatcaattatgagaaaaatgtctagaaatattagtccatataatgaaaatataaaacataaaataactttattagatggtaatatagatgctgaatggatagaaagtatgaatactgtaatggatgataataaagtattaacattagtaagtaatgaaagaataccctttactaaagaaatgcacttattttttgaaatcacaaatatgaaatatgcatcacctgctactgttagtagaggtggagttctttttattaataaaggagatattagttataaattatttataagttcatggattaatttgttaaataataatatcgcaaaaacggaattttattatctattcaatattttctattcacaaaatatagacatgttaagaaaacaatgtaaatttgcttttgatctttcaaacttagatattgtaaaatctatatgtaattatattgattatttcttgtataaatatgaaaaatatattaatgaagtcataaaaaaaatcgaaaacaaacaaaatgaagaaataacctttatgaaaaatgaaaataatagagaagacttatcgaattccaacatgaaaagaaaagataaaacaacaaaagataaagatacaaaagaaataaatgatattcataataaagatataaaaacacatgaaaaaggatctcaaaaaatggacaaaaaaacaaattctttcaaagataaaataataacaaatgataatgaatctaaattaaaacatcaaaaaaatatgaatcatgtagatgatataaaaatgaatacaaaaaatttaataaataatgaagaaaaaaatataataaataaaattaattataattatgaaatattaaaagattattataattgtttttttatgaactcgtacatgtgggtaataaacaatttgataatagatgataaaattatgaattcgaaaaatatatttagtaacaatattaaaagtaatttaaaggtaaaaatggggaatgactattgttgtaattatatatataatatatatgaaaataattggaaacacttgagcgaatatttagatgaagatattttatttcttcagaaattaaaatggaaaacttctgagatggaaaatgaggaaaagggctatgaacatgaagtggtactagagggtgatgaagatgacaatatggatgatgcaaatgaaaatatggatgatgcaaatgaaaatatggatgatacaaatgaaaatatggatgaaacaaatgaaaatatggatgaaacaaatgaaaatatggatgacacaaatgaaaatgtggatgatatacatgacaatatggatgacacacatgacaatatggatgaaaagaaaaagaaaaagttaataaaaaataagaaaaagaaaaaaaaggcaattaataactatattgaaaatatgttaccaaataattatgatgatatatatataaacaccatagaattaataagaattgaaaaaatgataaaatattgtttagaaagaaatcaagcaatattagtatatggaaataatggtacaggaaaaacgaaatgtattaagaataatataaatatgaatattgaaaagtttactcatacaattataagtataaattattatacaaattcattcgtactacaaaaaatcatagaaaataatgtggaaaaaagaaatacaagaacctatggtcctcctaatcaaaagaaacacatattttttctagaggatttaaatataactgccaaagacaattgtgatactcaacagacattagaatttttaagacaattattaacatataaattaatatatgatagagataacttagatgaaaagaaatttattcatgatatatcctttataggaactattaataataatacaaacaaacttatagataaaagaattcagaataaatttagtataataaatattgatgatataagtatgaaaacatttgaaaatatatataaaataatattaaaacaacatttacttaaatttgatgattctataaaatgtttattaaataatattatatcattttcttatgatttatatactaatataacagagaatatatcatttaatttgtctaatctagctcctcattatttatttaatttgaatgatatacatacaatattttataatataataaaatgtactaatccagatatatataataatcaatttaaatttcttatgattgtatttcatgaaatgcagcatgcatatataaataagttaatatctgatgatcatataaatatttttactcaattatttaataaattagttcagcaatatttcccattctttaaagaagattttgaaaaacatatagatatgtttgatagtactaatgagccacataatgttgaacatggtcaggatattacatctaataagtctttaacatttcatgaaaatgataatgttgatgatgatacatataataataatatggataatggcttcaaaaatgacagaaatgttaataataataatattgatggtgatgataatggtgatggtattaatgttagaaccgttgaaaaaactcatttagacatgtcaaataatctaaataattcaaatgataaagacaatattatgaaaatgaaaaaaagtaataatattaacacagatagttacaataataataatattaatgtgaaggtaaaagaaaaaaatttaatatatgatttaaacaaaaatatttttacatcttttatatctattagaaatggattagataaaatgtatctaaatgtaaaaaaattttatgtattaaaagaagtattaacagaaaaattgaatgaatataatactacacatgtagaatta

SEQ ID NO: 227 - DNA, 2334 bp, Plasmodium falciparum
ttatattcaaatggaaaacaagaagatactgacatgaaggttgttcaagcgtctgatggtatgattactaataacaacatgatgatacacaataataacaatagtgattttcttcatgtacaaacgaaaaagataaaagataataattattataatatgttattaaatgtatggcctgaacaagttaaaaacattgttagaaaacatccaggttttgatgttgctctcgtatctgaagaagattatttgaataacataaataatgaagatgattattatgttgataatgaacaaaacaatgatatttttaattatgatgataaaaataataatggacatggatatatcttcttaatcttgttaaacaaaaacttttttgttgatgagtttatgaaaagttcaaattatgaacaagccaaaaaaaattacttctgtgataaaataaaagaaataatggaagatttggaaaaattattggatgatttgaagcataaatattgtcctgttgacgacaacaacaatgataataataataatcatgatgataaccatgatgatgataaccatgatgatgataaccatgatgatgatgaccatgatgataatttgccaactgaacgtccggttgctaccttttacaattatcttacggataaatcgaattataaaaaaataaatcctcatgttcttggagagattgctggaattacgaaacatctaagatgtgaagattttcctaatatttcagatagatgtgttaataatatttctatacatcataaatatggaggttggtttgaatttggtggcgccatccatctaaagaacatgaattatgttgaacctacatatgaacaacatgatgatattatgaaagaaacattcgaagaagttatattagctcaagcaaattgtaaatgtcaaagtattggattgtggagagatatacctgaaaaagatatgtctgaatatagatatcctttgaatgttttcgttttagaaaatccaaaatataatttattgaacttacaagatatacatccatatcttgttgttgatatattaaataaaggattgcatgcaatgaaagcatatgctagcggtaaaatgtataatattgtaacaccgaaggacatatcaaataataatgatgaagaagataatatgtcgaatgaaaataatactacctatgcttacctaaatgattaccatagtgatagtacccatgttcccgatgaagataatgaagcacaagatgaagaagatgaaaaacaagaaatagaagacgatgaagaagaaaaagaagacgatgaggaagaaaaagaagaagagacaacttcacaaccaaaagatgttgatgataatggaccaaatgatccattttacgatggaacattcaacgttttaaataaagaaaatgtacaaacaacttcacaaccaaaagatgttgatgataatggaccaaatgatccattttacgatggaacattcaacgttttaaataaagaaaatgtacaaacaacttcacaaccaaaagatgttgatgataatggaccaaatgatccattttacgatggaacattcaacgttttaaataaagaaaatgtacaaacaacttcacaaccaaaagatgttgatgataatggaccaaacgatccattttacgatggaacattcaacgttttaaataaagaaaatgtacaaacaacttcacaaccaaaagatgttgatgataatggaccaaacgatccattttatgacggaacattcaacgttttaaataaagaaaatgtacaaacaacttcacaaccaaaagatgttgatgataatggaccaaacgatccattttatgacggaacattcaacgttttaaataatgatattaaagagaatgagcaagatgcagatattatagctcaaggttcaagtggtcaaacacaagaatatataaaagacgtagaaaataatgtagaacgaaataatgaaaacaatattaaaaaaaagaatattgataataatgataataatgataataatgacgacgacgatgatgatgatgatgatgatgatagtacaaataaaaatggaaatttattaaaaggtacaatatcggataatcaagtaacaagcaattttagggagaaattatttatatttataatactttgtttaatatctgtatgccttgctttattagtaagtattgctataaaggtatatgcatctgttatgaaaaaaaaaataggtgataagcatgatgttgttttatcctttaaggatagagaagaaattcctgttgtttccggaataccagctccatggttaagttcttaa

SEQ ID NO: 228 - DNA, 729 bp, Plasmodium falciparum
gtgcatataggtacaaaaaatttagagaacaagatgaaaagatacgtttatacgagagcaaaggatggtgtacatattataaacttagcgaagacatatgagaaattacagcttgctgcacgaattatcgtagctataagcaacccagcagatgtagtagttgtatcagcaagaccttttggaagtagagctgtgttaaaatttgctcagtatacaggagcacaagccatagccggtagatggactcctggtatgttaacaaatcaaattatccaaaaatttacagaaccaagattattaattgtaacggatccaagaacagatgcacaatcggttaaagaatctgcatatgcaaatatccctgtaatagcattatgtgattcagattctcctttagaacacgtagatattgcaataccatgtaataataaaggaaaagaatccattgcacttatgtattggttattagctcaagaagtattatatttaaagggtgttattccaagatcagaaccctggaatgtaatggttgacatgtttttatggagagacccagaacaatttgaattaaaaaatctagctaatgaagaaaatacaccaaccgctccacatttaattgaaaatcaatatgccgctgaagctccttatgatgaatggaccaagaaagaagaatggaatgataatacaaatgaggattggaaaaatccaatagccgctgaagagtggtaa

SEQ ID NO: 229 - DNA, 2601 bp, Plasmodium falciparum
atggatgactctttaaacaagctgcaagataaattaagaaaagaaagaaccaatgctcagttcattttaaataaatgtaattttaatattattgaacgatatgaagattcatcgagtgaagaagaaaatgaatttgaaaataataatagtaaaggaaagagcgatttaaaaaataatgatgaagaaaataatagcttatataatcaaaagaaggataatatattgaatgataacaacaataacgaaaatactgtaagtaaaaaccaaagctctacaaataatcaggcatatacaacatataataattataaatatttaaataataatgttagcttccctttagctttacatagaagtatattaaatttacaaaaaaataataaaaatgaaaaactacagaaagtacaaatttgtgaaaataaagaagtcaccattaataagaataataataataataattaccaaaaaaatagaatcaattataacaatattattaatcttaaaaagaacgtgaaatataacgataataattctgatgaacacatttttatgaatgcaaaaaaaatatatataaatgaaaaatatcaagatgatgcacaaagcaaatacaaccttacctttcaacttaacaaaaatgaagtagcaaaactcgaatggaccaatccagtcaaagatgatgaaataagaatcataaaaaacatacaagaaattaaattacatgaaatacgttttgattttcaaggaaaactaagaattcaaataaatgaaaaattatataatgaaaaagaaaataaaataatattcaatcattttaatggattatatcatcataatgaagaacccttaaatagcggatatacactccctgaaatattatatttgtgtcaaagttcttataataatcaagtttgtatttcattaaaaattttaaaacatgtttttataaatatgcacatgaaattattatatatatatcctgcatttcaaaatatttttaattccaattttatgaaaaataaatattcttatggatttacttataaacgatttattaattatattaataatgatttaaaaatattcgaaaaattacttattatttttaattattattataataaaaatgtagaaataaattgtctacatgccttagctagctatttatttccaaataatattttccaaataaatgataatgtactatttaatgaaaatatggacacaaataataaacaagaaaaatataattacatattctttcaagattatcaattattttcttatctaaatttttttagtgatctcgccttttttgtcgatggatataatatctatttttactcaaacaaaaaatataaaatcaaaaattttaaattctctaatgttaataataaaaatggttttggtcataatattctgaacaagtcaggtcaaaaggaggatcagaatattgaagaggatattcctgatgatttggaagatcagatgggggatatatattttttggatgaaaataatgatatatatgaaacaaaaataaatgaagtcgataagaatgatgtattgaatggtaataatgatatatcgaatggtaataatgatatatcgaatggtaataatgatatatcgaatggtaataatgatatatcaaatggtaataatgatatatcgaatggtaataatgatatatcaaatggtaataatgatatatcaaatggtaataatgatatatcgaatgataataatgagacggttcataatttttcgaattttttaaaaagatatagagaaaaggatagctcgatgttattaaaagaaggagaaaatggtattaatgatttatatattaataaaataaaaagatggaatacaaaaaaaaaaaaacaaattaatgataaaaatgtagatataaatgcaagttatataaataagaatagtcctgtggataatgaccccattatacataatgaccctactagtaaaccaaataataaaaatttaatgtcattttttgaatatatggatacaattaattatgatcctttaaaaattagaaacctcaattttgaaatgataaaatattgttatatgaacaaatataattataataaaatattaaataatataaataatatattaacaaataattttgctattttagaaatagaaaatagttgtgtatgctttttaattggattattaattaagaaaaaacaagaaataaatatattaaaaaatagtgatttaataaaaaatatagaaaaaatattagaatccaaaatggttggaacagatttatatcaagaaagattaaataaacaaaacaataataaaaataatttattatattcacatgaagacatatttataaatcctatacatataaattttatttataatttgattacattaataaaatatattattatatataattatgataaggaaatattaaataaaatagacatattaccatttctgatgttcttccgaaccctaccattttttattaacaataaaaataaagagaaagatataaatgaaaatataaatgtaagcacacataaaaatattaaaacaaatacacacaccaataaatat

SEQ ID NO: 230 - DNA, 2178 bp, Plasmodium falciparum
gcgacgaataataatgataataataatgataataataatgatagtagttcttatgacaaaagtataacgatcagcagaagcagtagctgtaataatagccatttgagttatagtagttttgataataatcatggaaatgaaaaaatgaaagattatataagtgttgatgaaaataataataataataataataataataataataataataataataataataaaaataataatgtattgttaactttacaaaggaacagtgatgatgaaaatggtaaagataaagataatgaaaaaaatgacgtaagtttagaaaacaatatggaaaagaattataaagaagaaatatggaattattatacaaaaaataaagtggaagtaaaaacattagaaaaagtattaaatgaaaatatagatacatcagtagtttgtataaatttacagaaaatattagctcagtatgttagatttaaaaagaatcttccacatgttactccattctattctgtaaaaagtaataatgatgaagttgtaatcaaatttttatatggattgaattgtaattttgattgcgcttcgataggtgaaataagtaaagtaataaaattattaccaaatttatcaagagatagaataatttttgcgaatacaattaaaagtattaattctttaatatatgcaagaaaggaaaatattaatttatgtacttttgataatttagatgaattaaaaaaaatatataaatatcatccgaaatgttctttaatattacgtattaatgtagattttaaaaattacaaatcttatatgtcttcaaaatatggagctaatgaatatgaatgggaagaaatgttattgtatgcaaaaaaacataatctaaatattgtaggtgtatcatttcatgttggtagtaatacaaagaatttatttgatttctgtctagccattaaattatgtagagatgtattcgatatgagtagtaatatgggatttaatttttatataataaatttaggagggggatatccagaagaattagaatatgataatgcaaagaaacatgataaaattcattattgtactttaagtcttcaagaaattaaaaaagatatacaaaaatttcttaatgaagaaacatttctcaagacgaaatatggatactatagttttgaaaaaatatcattggctattaatatgtcaatcgatcattattttagtcatatgaaagataatctaagagttatttgtgaacctggtagatatatggtcgctgcttcgtcaacattagctgttaaaattataggaaagagacgtccaacttttcagggcattatgttaaaagatttaaaagaccattacgatcctttaaattttgctcaacaagaaaataagaaacaagacgaaacaaaaataaaccacaataatgataataatgataataatgataataatgataataatgataataatattaataataataataataatcaaaaagggggccaaggaaatattatgaatgatctaataataactagcacaaatgattctactaataaaaagaatgatcattcttctagtcaagttattcaaaatgtatcgtgcacaatacgtgataaagaaggagataatattaaaataaatacacataccataaataatcctaatataaatggaaaagaaaataccgtggatggtgataatattaatattgctcataaaaatattggtaataactttagtagtagtaattcaaaattaggcaacataacaaatattaagaaaaaagttgttaatattaatgacaatagatataattatttctcatattatgtaagcgatagtatatatggttgttttagtggtataatttttgatgaatacaatagatgtcctatttatgttattaaaaacaaaaataaccctaatcaaaattttatgaattttaatttgtatttagctaatgtatttggacaatcatgtgatggcttggatatgatcaattctattacgtacttacctgagtgttatattaatgattggcttctctatgaatatgctggggcatacacttttgtcagctcatcaaactttaatggatttaagaaatgcaagaaggtgtatatattccctgaatcgaaaccttcccttaaggggcaaccaaacaaacattggtaa

SEQ ID NO: 231 - DNA, 1068 bp, Plasmodium falciparum
atgaaagttggtaaaatattctttttgttaaacatccttgtagtatgccacttcattatatcatgcttatgtcgaaatggacaaactactcgtgggaatttattagcattaaaagccattgaacaggatttacaacaaaagaagaatagaaaaagaaatttgattttatattcactaggttctgcagcattaatagctgcccttgtcgttacaggtataggacttaatatgtatatgaaaaagaaaaatgttgactctgaggtacaagaaattatagatgaaaaagatgaaaaagttaaagaaaaaccagctgagaaaaaaaaaactacagtaaaaatagtttccaaaagagttcctgtaaaatctaaatcttcaaatggtaaatcaaaagcacgtaccgtaaattcggaggtatctccaaaattagatgatgaaaaaaaagaagatttattaaaatttaatgataatgatcttttattagcagctgaatcattaaaagaattgaatccaaaatatgatgaaaatactcaaggaaatgattcttttaaaaatattaatgaacctagaaaacttgcttcttttagtctttatgacgcattagctgatgcttctgaacaaaataaaaacaaagatgctgaaagttctacaggtcaaatacctactccaacagaaagtagtcatggtatatcagatggtaaaaaagatacatccacaaatgatatggatcctttaaatccttatggttcatctaaaagaaattcctctgaagataaaccaacatctgaatcaaaaggcacgacaccagaatctaattttgattccaaaactcctgaaataaaggaaataaatgaaccaattatagtaccttcatattatccaactactggtccaaatcctaatacccatggaccaccaagcagaagaatttcaacatctagatcttctggatcgtccaatagaagttcatcaggaactagtacaagatccaaaggtccttctagcccattacgcgattcttcaggaagatcaagtggaagaagtaccacaccaagagtcagaaaagaataa

SEQ ID NO: 232 - DNA, 657 bp, Plasmodium falciparum
gataatcagcttaggaaaaagtacaagcttcaatacaaacctctgtcggatgaagacccattattatgggttgacgctcctttaataaaaataaaagaattcgaaagaaaatttcctgaactagctttatggcctagaaatgtatcccaatcaaatgtagaagtgaacaacgctaatgatgcatttaataagcaatggtatttattagctaatcaattaatattaagtttaagtaaatatgaaggtggtcatatatttgagaaattagtagatgctaaaaaacagaattgtccagattattatgatgtaattaaaaacccaatgtcatttagttgtataaaaaccaaattaaagaagggtcagtatgcatatccttcagaatttgtaaaagatgttcaattaatttttgataactgtagtttatataatacttcaaattctgtagtcgcaattacgggcaaaaatatcgaaacttattttaataaccagttaatagtaatgggatataataacttcattttaaaagaaaaaaaaattaatgacatgttaaaacttgtagaagaagaaaatattaagtggagtaaagaaaaagaagatcaaatagaggaaatagacgaattagaaaataatcaagaggatagttcaaaaaaagattga

SEQ ID NO: 233 - DNA, 1758 bp, Plasmodium falciparum
atgaatagaatcttgtctgttacattatgtttgttttttatatatttatatatatataaaacatatggaaaagttaaaaatacagatgaaggattatcaaatatctatggagcaaaatattatttaagaagcggattatttaatgaaaaaaatggtaaaggacaaaaatatgaagatttagaagaagaaaaagaaggcgaaaatgacgacgaagaggattcaaatagtgaagaatccaataatgatgaagaaaatgaactaataaaaggtcaagaaggtgttgaacaagaaactcacggatcagaagatgaagtaagtaatggacgagaagataaagtaagtaatggaggagaagatgaagtaagtaatggaggagaagatgaagtaagtaatggacgagaagataaagtaagtaatggaggagaagatgaagtaagtaatggacgagaagataaagtaagtaatggaggagaagatgaagtaagtaatggacgagaagataaagtaagtaatggaggagaagatgaagtaagtaatggacgagaagataaagtaagtaatggaggagaagatgaagtaagtaatggacgagaagataaagtaagtaatggacgagaagataaagtaagtaatggaggagaagatgaagtaagtaatggacgagaagataaagtaagtaatggacgagaagataaagtaagtaatggaggagaagatgaagtaagtaatggacgagaagataaagtaagtaatggaggagaagatgaagtaagtaatggacgagaagataaagtaagtaatggaggagaagatgaagtaagtaatggacgagaagataaagtaagtaatggacgagaagatgaagtaagtaatggacgagaagataaagtaagtaatggaggagaagatgaagtaagtaatggacgagaagataaagtaagtaatggaggagaagatgaagtaagtaatggacgagaagataaagtaagtaatggacgagaagataaagtaagtaatggaggagaagatgaagtaagtaatggacgagaagataaagtaagtaatggaggagaagatgaagtaagtaatggacgagaagataaagtaagtaatggacgagaagataaagtaagtaatggacgagaagatgaagtaagtaatggacgagaagataaagtaagtaatggaggagaagatgaagtaagtaatggacgagaagataaagtaagtaatggacgagaagataaagtaagtaatggaggagaagatgaagtaagtaatggacgagaagataaagtaagtaatggaggagaagatgaagtaagtaatggacgagaagataaagtaagtaatggacgagaagataaagtaagtaatggacgagaagataaagtaagtaatggaggagaagatgaagtaagtaatggaggagaagatgaagtaagtaatggacgagaagataaagtaagtaatggaggagaagatgaagtaagtaatggacgagaagataaagtaagtaatggaggagaagatgaagtaagtaatggacgagaagataaagtaagtaatggaggagaagatgaagtaagtaatggacgagaagataaagtaagtaatggacgagaagatgaagtaagtaatggacgagaagataaaggaggagctggaacggatggagaactttcacataatagcgaaagtcatactaaaaacaaaaaatcaaagaatagtataattaatatgttaattggaatgtga

SEQ ID NO: 234 - DNA, 2094 bp, Plasmodium falciparum
atgaagaaaatatatagtattttcttttctttatttattttgaatcttcatatatatataaaaaatatcaaatgcaatgacctaataaattataatgattcgaatctaagaaacggattactaaataatagtttagatttaacaaatggattaaataacaaagataacagttttattgattctaaaattgaagaacatgaaaataaatcttaccaaaataaagataataatatctctatcgttggacaagatgtgcctattacatcggtatattcttctaaaattataaatgctaatgatttagaaggaaatagtattgacgatactaaaggtcttagtgttactaatagtggatttgatgatggtagtgcttttggtggtggactccctttttctggttattctcctctacaaggaaatcataataaatgtcctgatgaaaatttttgtaagggtattaaaaatgtcttatcctgtcctccaaaaaattctactggtagaaatggggattggattagtgtggctgttaaagaaagttcaactacaaataaaggtgttcttgttccccccagaagaacaaaattatgtctaagaaatattaacaaggtttggcatcgaatcaaagacgagaaaaattttaaagaagaatttgttaaagttgctttaggagaatcaaatgctttaatgaaacattataaagaaaaaaatctgaatgcccttacagctataaaatatggattttcagatatgggagatataataaagggaacagacctaattgactatcaaattactaaaaatataaatagggcattagataaaatattacgtaatgaaacaagtaatgacaaaattaaaaaacgtgtagactggtgggaagctaataaaagtgcattctgggatgcattcatgtgtggatataaagttcatatcggaaataaaccatgtccagaacatgataatatggacagaataccacaatatcttagatggtttagagaatggggaacatatgtttgcagcgaatataaaaataagtttgaggatgtaataaaattatgtaatatccaacaatttacaaaccaggatgattcacaactattagaaatatcaaaaaaggataaatgtaaagaagcattaaagcattatgaagaatgggttaatagaaggagacctgaatggaaaggccaatgtgataaatttgaaaaagaaaaaagtaaatatgaagatactaaaagtataactgctgaaaaatatttaaaagaaatatgttctgaatgtgattgtaaatataaagatttggataatacatttaaagaatttaaagataacgttacacttcttaaagcagtaattgataacaaaaaaaatcaagattctctaacaaccacttctttatcaacgtctattaatagtgttagggattctagtaatctagatcaacgagggaatataacaacatctcaaggaaattcacaccgtgcaactgttgtgcaacaagttgatcaaaccaacagattagataatgtaaactctgtaacgcaaagaggaaataataactacaacaataatttagagcgtggattgggttctggtgctcttcctggtacaaatattattactgaagaaaaatattctctagaattaataaaattaacatcaaaggatgaagaagatattataaagcataatgaggatgtgagagaagaaatagaagaacaacaagaagacatcgaggaagatgaagaagaattggaaaatgaaggagaagaaacaaaagaagaagatgatgaagaaaagaatgaaacaaatgatacggaagatacggacgatactgaagatacggaagatatagaagaggaaaataaggaaaaagaactcagtaatcaacaacaaagtgaaaaaaaaagtatttcaaaagttgacgaagattcatatcgaatactatcagtaagttataaggacaataatgaagtaaaaaatgttgctgaatctatagtgaaaaaactatttagtttatttaatgataataataatttggaaactatttttaagggtttgacagaagatatgacagatttatttcaaaaataa

SEQ ID NO: 235 - DNA, 1698 bp, Plasmodium falciparum
atgaaacatattttgtacatatcattttactttatccttgttaatttattgatatttcatataaatggaaagataataaagaattctgaaaaagatgaaatcataaaatctaacttgagaagtggttcttcaaattctaggaatcgaataaatgaggaaaagcacgagaagaaacacgttttatctcataattcatatgagaaaactaaaaataatgaaaataataaatttttcgataaggataaagagttaacgatgtctaatgtaaaaaatgtgtcacaaacaaatttcaaaagtcttttaagaaatcttggtgtttcagagaatatattccttaaagaaaataaattaaataaggaagggaaattaattgaacacataataaatgatgatgacgataaaaaaaaatatattaaagggcaagacgaaaacagacaagaagatctagaacaagagagacttgctaaagaaaagttacaggggcaacaaagcgatttagaacaagagagacttgctaaagaaaagttgcaagaacaacaaagcgatttagaacaagagagacttgctaaagaaaagttgcaagaacaacaaagcgatttagaacaagatagacttgctaaagaaaagttacaagagcaacaaagcgatttagaacaagagagacgtgctaaagaaaagttgcaagaacaacaaagcgatttagaacgaacgaaggcatctacagaaacgttgcatgagcagcaaagcgatctagaacaagagagactagctaaagaaaagttacagggacaacaaagcgatttagaacaagagagacttgctaaagaaaagttgcaagaacaacaaagcgatttagaacaagagagacttgctaaagaaaagttgcaagaacaacaaagcgatttagaacaagagagacgtgctaaagaaaagttgcaagaacaacaaagcgatttagaacaagatagacttgctaaagaaaagttgcaagaacaacaaagcgatttagaacaagagagacgtgctaaagaaaagttgcaagaacaacaaagcgatttagaacaagagagacttgctaaagaaaagttgcaagaacaacaaagcgatttagaacaagagagacgtgctaaagaaaagttgcaagaacaacaaagcgatttagaacaagagagacgtgctaaagaaaagttgcaagaacaacaaagcgatttagaacaagagagacttgctaaagaaaagttgcaagaacaacaaagcgatttagaacaagagagacgtgctaaagaaaagttgcaagaacaacaaagcgatttagaacaagagagacttgctaaagaaaagttgcaagaacaacaaagcgatttagaacaagagagacttgctaaagaaaagttgcaagaacaacaaagcgatttagaacaagagagacgtgctaaagaaaagttgcaagaacaacaaagcgatctagaacaagagagacgtgctaaagaaaagttgcaagaacaacaaagcgatttagaacaagagagacttgctaaagaaaagttacaagagcagcaaagcgatttagaacaagagagacttgctaaagaaaagttgcaagaacaacaaagcgatttagaacaagagagacgtgctaaagaaaagttgcaagaacaacaaagcgatttagaacaagagagacttgctaaagaaaaa

SEQ ID NO: 236 - DNA, 1578 bp, Plasmodium falciparum
aaagacttgctgagacttgctaaagaaaagttgcaagaacaacaaagcgatctagaacaagagagacgtgctaaagaaaagttgcaagaacaacaaagcgatttagaacaagagagacgtgctaaagaaaagttgcaagaacaacaaagcgatttagaacaagagagacttgctaaagaaaagttgcaagaacaacaaagcgatttagaacaagagagacgtgctaaagaaaagttgcaagaacaacaaagcgatttagaacaagagagacgtgctaaagaaaagttgcaagaacaacaaagcgatttagaacaagagagacttgctaaagaaaagttacaagagcagcaaagcgatttagaacaagagagacgtgctaaagaaaagttgcaagaacaacaaagcgatttagaacaagagagacttgctaaagaaaagttacaagagcagcaaagcgatttagaacaagagagacttgctaaagaaaagttgcaagaacaacaaagcgatttagaacaagagagacttgctaaagaaaagttacaagagcagcaaagcgatttagaacaagagagactagctaaagaaaagttacaggggcaacaaagcgatctagaacaagagagactagctaaagaaaagttgcaagaacaacaaagcgatttagaacaagatagacttgctaaagaaaagttacaagagcaacaaagcgatttagaacaagagagacttgctaaagaaaagttgaaagaacaacaaagcgatttagaacaagagagacgtgctaaagaaaagttgcaagaacaacaaagcgatttagaacaagagagacgtgctaaagaaaagttgcaagaacaacaaagcgatttagaacaagagagacgtgctaaagaaaagttgcaagaacaacaaagcgatttagaacaagagagacgtgctaaagaaaagttgcaagaacaacaaagcgatttagaacaagagagactagctaaggaaaagttgcaagaacaacaaagcgatttagaacaagagagacgtgctaaagaaaagttgcaagaacaacaaagcgatttagaacaagagagacttgctaaagaaaagttgcaagaacaacaaagcgatttagaacaagagagacgtgctaaagaaaagttgcaagaacaacaaagcgatttagaacaagagagacgtgctaaagaaaagttgcaagaacaacaaagcgatttagaacaagatagacttgctaaagaaaagttacaagagcaacaaagcgatttagaacaagagagacgtgctaaagaaaagttgcaagaacaacaaagcgatttagaacgaacgaaggcatctacagaaacgttgcatgagcagcaaagcgatctagaacaagagagacttgctaaagaaaagttacaagagcagcaaagcgatttagaacaagagagacttgctaaagaaaagttacaagagcaacaaagcgatttagaacgaacgaaggcatctacagaaacgttgcgtgagcagcaaagcgatctagaacaagagaaactagctaaagaaaagttacaggggcaacaaagc

SEQ ID NO: 237 - DNA, 1572 bp, Plasmodium falciparum
agcgatctagaacaagagaaactagctaaagaaaagttacaggggcaacaaagcgatctagaacaagagagactagctaaagaaaagttacaggggcaacaaagcgatctagaacaagagagactagctaaagaaaagttacaggggcaacaaagcgatctagaacaagagagactagctaaagaaaagttacaggggcaacaaagcgatttagaacaagagagacttgctaaagaaaagttgcaagagcgacaaagcgatttagaacaagagagacttgctaaagaaaagttgcaagaacaacaaagcgatttagaacaagagagactagctaaagaaaagttgcaagaacaacaaagcgatttagaacaagacagacttgctaaagaaaagttgcaagaacaacaaagcgatttagaacaagagagactagctaaggaaaagttacaggggcagcatagcgatttagaacgaacgaaggcatctaaagaaacgttgcaagaacaacaaagcgatttagaacaagagagacttgctaaagaaaagttgcaagaacaacaaagcgatttagaacaagagagacgtgctaaagaaaagttgcaagaacaacaaagcgatttagaacaagagagacgtgctaaagaaaagttgcaagaacaacaaagcgatttagaacaagagagacgtgctaaagaaaagttgcaagagcagcaaagagatttagaacaaaggaaggctgatacgaaaaaaaatttagaaagaaaaaaggaacatggagatgtattagcagaggatttatatggtcgtttagaaataccagctatagaacttccatcagaaaatgaacgtggatattatataccacatcaatcttctttacctcaggacaacagagggaatagtagagattcgaaggaaatatctataatagaaaatacaaatagagaatctattacaacaaatgttgaaggacgaagggatatacataaaggacatcttgaagaaaagaaagatggttcaataaaaccagaacaaaaagaagataaatctgctgacatacaaaatcatacattagagacagtaaatatttctgatgttaatgattttcaaataagtaagtatgaggatgaaataagtgctgaatatgacgattcattaatagatgaagaagaagatgatgaagacttagacgaatttaagcctattgtgcaatatgacaatttccaagatgaagaaaacataggaatttataaagaactagaagatttgatagagaaaaatgaaaatttagatgatttagatgaaggaatagaaaaatcatcagaagaattatctgaagaaaaaataaaaaaaggaaagaaatatgaaaaaacaaaggataataattttaaaccaaatgataaaagtttgtatgatgagcatattaaaaaatataaaaatgataagcaggttaataaggaaaaggaaaaattcataaaatcattgtttcatatatttgacggagacaatgaaattttacagatcgtggatgagttatctgaagatataactaaatattttatgaaactataa

SEQ ID NO: 238 - DNA, 2445 bp, Plasmodium falciparum
acagcattaaatacatctgtcgatatgaaaaaaggaaaaaataagttgaacaataatatgaagggtttaagtagtcctgtatcaaatgtagaacaatttgttatagatgatatgatgaaaacagaagaacaagaaggaaaggagaaaaatgatataccaatatatatgccgaatttatctcttttaggtaatatgaataaaaaaatattttttggtaatatcaatataagtggtgataatattgaaaatttcaatatgtctgaaaacagtgttatggaacatatgaaacataataatatgttaaatgaggttgataataataaaatattaaatgctgaaaataaaaagaaaataaataatataagaaaaaattatgccttagaagcatcatcaatgggattaagtaataatgataataatatatcatcacaatattataaagaagaaaataataacaatatgaacaatcgtaattatgacgtaaaccattctgatttaagaaaccaaaaggatagagaatttaaacattttgattttaaaaataaaaaccaaaaaagagaagattatcacaacaataacaatataaatagtattcataataatgatttattcaatgaaagcaaaaataaatctacttatgtatcatccaataaaaattcacatcatataaataacaataataataataataataataaatcaaataatttgacattacccaagatcggggcatcatcagcatcgaattcattaagtcatcaacaattacaaacatcaattaataatacaaaacatttgttaaatacctctacaaatacagcttttcttaataaatcatcaactgttgcaacacatggatcccaagaaaattcttctgcagcttttatgagtggtaaaaacagtaaatatcttcaaggctcttttaaaaataagaattatgataataatgatttggatgacactaattcaatacaattaaatcaaatatcccagaaatttttacgaagtcatcaaaatgtagtaaataataatatatcaacaagtggtattaataataatacaactagtgctacagttattagtacaaataataataataatacgagtagtgcaaccaataataataataataataataacacatcaaacgtaaatattacgaataaaaataccagcagtgatattaataatattaacttaatgaatatgggtatgaataatttgaataataataacatgtatagtacatataattctcctccaggtttagcgaatcagtataattattcttatggaaacttgtcatatccatacaacaacatgccctataatggttatacaactcaagcattggttccacaatatggattaatgaataatcattataataaaagtagtagtatacataacaacaatttcaattataatataaattatgagaatttcgatgaatctaatttatatgcacataataataacatccacatgaataatagttttgtgaattttataaatggaaataacgttaagaaaaatcaactcaatggagatgatgataatattagtaactctggagacatgacaataacaggaacacatcaagctataaatttgactcatgataattcaacaaataatgttaatcaaaatgcaaccaatgtaaataacaataatagcagcaataataataacaataataataataacaataacaataacaataacaacaacaataataataataataataatggtgtgtgtgtagataatactaccaatagtggacttggtaatttatctctgaacaacattaataataacctaaacactaatataagtatttcatgtaacacaacagatttaaaaaataagcaacaattaaataaaaatataaatgatttacaattacaaacatcaacacaaagcttaaaacaaaacttacatacacacaataaaaataattcaatgagtacaaaccaacaaactattcaaaataaacatacagggcaacatcaacagaatttattgaataataataattcattaggacaatatacgcaaaaccaaatacagccaaatacatctcaaaatactgcatcttcaacatcttcatctgttacgggaaaggcagatacaaataatataaataatgcttcacagaataatcaaaataattatataagcaaacaattatatcataatagcaattattataatataaattcaagtagttttaatataccaccaggatttaatatgtctcaagataaagaacaaaataataattacttaaataataatattacaactaataataataatacaaatgtaagtgcatacagaaataattggaatagtattaatgaaaaaaatttaaatcactataatttaaattataattataataggagtaacaaaaacagttttaattacaccagcaacttc

SEQ ID NO: 239 - DNA, 774 bp, Plasmodium falciparum
ttaaaagatagcacaaatggagaatttacaaaaaaggtaaaaaaacaattaaaagattattatgaaatgcgatttgataaaaaggtaataaacttaccatttagcacagattcgataaatatacaacaaagaggttttcatgattatagtaaagatatgaaattaaaaaagaatcatatgaataagcccttgtggatatgttcagatggatttatatatttagaaatgtttaatagttgtagtaagcaagcatctgattttttaataacaatagctgaaccaatatgtagaccagaattaattcatgaatttcaattaacgattttctctttatatgctgcaatatcagttggtataacacttgatgaattattaattaatttagataaattttctaaaaatgttttacccaatgaattaatatctaatatcacaaaaagtgctgaatcgtttggaaaagtaaaattagtgttaagggaaaataagtattatatagaagcaacaaacaaatcagagttagattatttattaaataatgatacaatacaaaatgcaagaatatattctactgataataataatgataaaaatatgataagtttgtataatttgaataataggcatagagataataacaaaaatgataataaaaataataacgatgataataataatatagacaaaactacaagtaatttattaaatgaagaccaaaaaggaaaagattgctacgtaacgtatgaggccccagtgttggatacaacacagttagga

SEQ ID NO: 240 - DNA, 234 bp, Plasmodium falciparum
gttgtaccagaagttgttgaagaggttgtaccagaagttgttgaagaggttgtaccagaagttgttgaagaggttgtaccagaagttgttgaagaggttgtaccagaagttgttgaagaggttgtaccagaagttgttgaagaggttgtaccagaagttgttgaagaggttgtaccagaagttgttgaagaggttgtaccagaagttgttgaagaggttgtaccagaagaacta

SEQ ID NO: 241 - DNA, 2343 bp, Plasmodium falciparum
cctgaagaactagtagaagaaattatacctgaagaaattgttgaagaggttatacctgaggaattgattgaagaggttgtaccagaggtattagttgaagaggtgatacctgaagaactagtagaagaagttatacctgaagaactatttgaagaggttgtaccagaagaattggttgcagaggttatacctgaagaaattgttgaagaggttatacctgaggaattgattgaagagtttgtaccagaggaattagttgaagaagaagtacctgaagaactagtagaagaagttatacctgaagtattagttgaagaggttatacctgaagaatttgttgaagaggtgatacctgaagaaattgttgaagaagttatacctgaagaaattgttgaagaggttatacctgaagaagttgttgaagaggtggtaccagaaattgttgcagaggttatacctgaagaagttgttgaagaggtggtaccagaaattgttgcagaggttatacctgaagaagttgttgaagaggttgtaccagaggttgttgaagaggttgtaccagaggttgttgaagaggttgtaccagaggttgtaccagaggttgtaccagaggttgttgaagaggttgtaccagaggttgttgaagaggttgtaccagaggttgttgaagaagttgtaccagtagaagtattagaagaagttatacctgaagaagttgttgaagaagtaataccagaagaatttattgaagaaatgatacctgaggaaatagttgaagaagtggtacctgaagttgttgaagacgtaatacctgaagaattgattgcagaggttgtaccagaggaattagttgaagaagaagtacctgaagaactagtagaagaagaagtacctgaagaactagtagaagaagttatacctgaagtattagttgaagaggttatacctgaagaatttgttgaagaggtgatacctgaagaaattgttgaagaagttatacctgaagaaattgttgaagaggttatacctgaagaagttgttgaagaggtggtaccagaaattgttgaagaggtgatacctgaagaactagtagaagaagttatacctgaagaaattattgaagaggttatacctgaggaattgattgaagagtttgtaccagaggaattagttgaagaagaagtacctgaagaactagtagaagaagttatacctgaagtattagttgaagaggttatacctgaagaatttgttgaagaggtgatacctgaagaaattgttgaagaagttatacctgaagaaattgttgaagaggttatacctgaagaagttgttgaagaggtggtaccagaaattgttgaagaggtgatacctgaagaactagtagaagaagttatacctgaagaaattgttgaagaggttatacctgaagaagttgttgaagaggttatacctgaagaagttgttgaagaggtggtaccagaaattgttgaagaggtggtaccagaaattgttgaagaggttgcaccagaagttgttgaagaggtgataccagaagttgttgaagaggtgatacctgaagaactggtagaaaaacttataccagaagaactagtagaagaagttatacctgaagaactagttgaagaggttgtaccagaagaagtagtagaagaacttataccagaagaactagtagaagaagttataccagaagaacttgtagaagaagttatacctgaagaattagttgaagaggttgtaccagaggaattagttgaagaggtggtaccagaagaactagtagaagaagttatacctgaagaactagtagaagaagttatacctgaggtattagttgaggaagaagtacctgaagaactagtagaagaagttataccagaggaaattgttgaagaggttatacctgaggaattgattgaagagtttgtaccagaggaattagttgaagaagaagtacctgaagaactagtagaagaagttatacctgaagtattagttgaagaggttatacctgaagaatttgttgaagaggtgatacctgaagaaattgttgaagaagttatacctgaagaaattgttgaagaggttatacctgaagaagttgttgaagaggttgtaccagaaattgttgcagaggttatacctgaagaagttgttgaagaggttgtaccagaaattgttgcagaggttatacctgaagaagttgttgaagaggttgtaccagaggttgttgaagaggttgtaccagaggttgttgaagaggttgtaccagaggaattagttgaagaggtgatacgaggtggtaccagaagaactaag

SEQ ID NO: 242 - DNA, 834 bp, Plasmodium falciparum
gcacataataaaaataaatcatacatagcaccgcatataccaactactacaacacgagtgttaagcgaatgtaacgtatatattcccaattatgataatgatccggatatgaattctgtgagggaaaatttccataagaaaacagaacaaagatttcatgaatacgacaaacgtatgatcaaaaacagacagaaacgtaaagaagaacgtgacaaaaatatacaagaaattattgaaaaagatagaatggacaaatcattagcagaaaaagtggaaaaaggttgtcttaagtgtgggtgtgggttaggaggtgttgcagcaagtattggaatatttggaacaattgctgtaaatgagtggacaaaagctgctacggctgcggcaattgatttggctattcaggagggtattgatgctggtgtaaaggtagtaattgcagaaataaaagcaactaatgcttttaaaagtatatggtatgtagaattgtcaagtttcattaatggatcaaattataatactgtcgatggtctttctgcagcaactaaggctgccttggattcaattggaaaacggtgcacatctagtattgtggatagagcgtgcaacggaatattaaacaatagtgatgggtggtttagttcaattgcggaagccggtaaacaagctgctactgccgcaactgaaagtgctaaaacaactaaacttgttgatgtaacaactacaagtacacatttgtacagtgcaattggttattcagttcttgccatatttattatattattggttatggtaattatttatttaattttacgttatcgaagaaaaaaaaaatga

SEQ ID NO: 243 - DNA, 2610 bp, Plasmodium falciparum
atggggtcacaaacatcaaaattttctaaaactgttgttggaaatgaaacacacaacagtgcccgaaatgttttggaaggttttgcaaaagatataaaaagggatgtatcaaataacgcaaaaagacatggaaaagttttgaagggaaatttgagagatgccaaattttatcatgattattctaagttaagagacatacctagaagtccctgtgatcttgatttttggtttcatacgaatgtttggagggacaaagcatatgaaagagatccttgttatggcagacaagcaaaaaataattacaatttggaaggagcagtatgtacgaatagtaaaataaaaggtaatgaaaacaagataaatgacattggagcgtgtgccccatatagaagacgaaatatatgcgattataatttagaacatctaaatgaaagaaatgttttaaatactcatgatttattgggaaatgtgttagttatggcaaaacgtgaaggtgaatctattgttgagaaacatccaaatagaggatcttcagaagtatgtattgcccttgcaagaagttttgcagatataggagatattttaagaggaaaagacatgtatgtcgggtatgatgaaaaagaaaaaaatcgaagaaaacaattagaaaataagttgaaagatattttcgataatatatataaggatttgacgaagaagaaggggaggaatgggaagaagtcggcgctacaagaacgctacaatgatcctaaaggagatttttttcaattacgagaagattggtgggcgcttaatagagaagacgtatggaaagcattaacatgttctgcggatgacagtgaagattatttcatacaatcagaaggtgttacaaaatcatttacaaatcctaaatgtggccatggtgacaatgaggttcttacaaatcttgattatgtccctcaatttttacgttggttcaccgaatgggcagaagagttttgtaggataagaaaaattaaattaggaaaggttaaaaacgaatgtcgtggtgagacatcaggtaaaaggtattgtagtggcgatggttatgattgtactaaaacagatatatcacgtaatattttttatatggatttagattgcccacgttgtgaagaagaatgtagaaaatatgatgaatggattgaaaataaagaaaatgaattagataaacaaaaaaataaatacactaaagaaattgaaaaattaaaagataattctaagagcaattatgataaaaatttttatttaacacttactaaaaaatatggttcaattaacttatttttagatacattaaaagaaggatcacattgtagctacaataccatagaagataaaatagattttaacaaagcaaatcaaacatttactagttcgaaattttgtggggcatgtcctttttatggagttaaatgcaattggaaaacatgtacagaggttaaggaaaatgagtacaaaaaaaaaaataaggttgatagtacacatacgacagaacaacctactgctattgatgtactagttactcatattagaggaacaaatattcccgaagatttaaaggattgtaaaaaatatggtctttttaaaggtatgcgaaaacaagcgtggaaatgtcaatatataaatccatatgatgaatgcaagttgagtccttttgtgaaagatatagatgttgatgatcgtattttatttaaagtattgtttgagcgttggttaaaatatttcatacaagattttaataatgttaaggacaaaattaatagatgtacaaaattcgaaaagggaaaagataatacatgtattaaaggttgtaaacataaatgcgaatgtgtggaaaaatggataaaaataaaggaagcagaatggaaaaaaataaatcaacattataaccaacaaaaaaaacattatacctatagtgttcctcgttgggttaatagttatttgacgcaccagcacttctctagtgattttattaatgcattagaagcttttaaaaatatacggggattagaaaatttgaaggaatgtagtagtgacacttgtaaaattgaaaaaattagaactatagatgatgatttaataaaagaattaatttctaaacttaaagataaatgtgctatgtgtaaaaaccaacataaagcaaccaaaggtaaagaatgttgtggtaaattacctaaaactctaaatgatcaagatgatgaagaagacgaagaatacgaagcaccaccaccaccaacacctcctcgcacccaaaaaaacccctgcgttaatggtcaaaaccagaaggttcgtaaaatcaggagcgtgagacgagtgccgaaaaggatgcaaaaacaagcaagtgttcgtgttcctcgtgctcggcagggaggggagagggagcaggttgtaaagaacgggcgccaggaccaccacctccagcgggtgcttttggtgggggaggcggaggcggaggagccggagacggcggaggaaaagaaggaggaggaaaaggaggaagacacggacgggaaggtacagccaccaccagcagcaacaacacccggggtgaagccgccatgtgacatagttgaaaaacactttaaa

SEQ ID NO: 244 - DNA, 2604 bp, Plasmodium falciparum
tcatgtggttatttctgtggtttagatatatgtacacccaacaaaactacaggtgatatacatgataaacaaaatgcaccaattagagtactgtttaaacgatggatagaaaattttttaaaagatcataacaaaattaaagacaaaatttctttatgtataaataatgaaaacagaaatatatgtacagatgtttgcagaaaaaattgtgaatgtatagataaatggatagagatgaaaatgaaagaatggaaaatagtacgcgatcgttacgtcaaacaatataatgttgctgattcagtagtttacgaagtgagaagatttttagagggcttgcaacctcaaaatgaccttgaaaaagttaaaggagatgttaatgatttacgtgatttagaggaactaagtgaatgtactaatactgtatcaacagaaaatagaaaatgtagaaaaaaggatgtagtagaaagtttgcttaataaacttaaaaatgaaatacgtcattgtaaaaatgaacgtgacgatagtatgggcaaggaaagttgcaaaacattacccgaacctacagacgatccacaaacagatagtgatacccacgacacacctgacataccaccaggtgacgttgcacccactttttgtaatgttccagcaaatccatgtggcgacaaaagcgccaccaatgtggtaaatgtgacagaggtggcgaaggaaatgcacgaagaggcacacaaggatatgttagagaggagtgttaaaaaggttgagagtaaggttaaggatagtacggttgagagtgtgttaagggctgatgcatcaaaaggtgaatataaacatgaaggtaatccagatgacttgaaacacaacatgtgcaatataacgaaggaacataccaattatcaaaaacgtggtggttataattatcgaggaccatgtacgggtaaaggtaatggtaaagacacaagatttgtcataggaaccatatggaaagatgaagacgaaaaagatgaaaccattaaagttctgttgcctccgcgacgtcgtcatatgtgtacatcaaatttagaatatttacttcatgttaataagggcccacttctaaaagttgaacctgataaaattaatcattcctttttgggggatgttttgcttgcagcaaaatatgaagcagaattcataaaaaccaattatacgagattaaatggccaaaatgacaatggagctaaatgtagagctatgaaatatagttttgctgatataggtgatattatacgaggaaaagatctgtggggaattcaggacttcaaggatctacaaactaagttagtaacaatatttggtaaaattaaagaggaaattcccgatattaaaaaaaaatatagtagtgaaaatcccccatatacgacattacgtgaacattggtgggaagcaaatcgagccaaagtatgggaagcaatgcaatgtccaacaataccaccagtcaccacaagttgtgatactaccactgttacccctcttgtggattacatcccacaaagattacgttggatgaccgaatgggccgaatggttctgcaaaatgcagtcacaggagtatgaggtgttagtgaaacagtgtaggaattgtaggagtggaatatgtgagaatggtaaggatgactgtgtcaagtgcacacaagcttgtaatacatataaacaaaaaataaaaaaatgggaagatcaatggaaggaaatatcaaaaaaatacaaaacattataccaacaagcaaaaggcagtgttaatggtgctactactagtagtactacagatgagaaagacaaagatgtcgttgatttcttgaaaatgttacaccaaaaaaatactgataataccatatatactactgctgcaggatttatacatcaagaagcacatatgactgattgtcaaaaacaaacaattttttgtaaaaacactagttataacgacaagaagaaatatgcttttcgtcatccaccacatgatcatgatgatgcgtgtgcttgcaggccaccatcaacgccagtagacgtctcccgcaaactagacacccaacgtgaccccaaaaaagaggaatctgaacctgaatccgaagaagaagaagacgatgccgaagaggaggaggagccggcaaaggagacggctaccacagagacaacacaaccagcagcaccagcgggaccaccggtaacaccagtaccagaactaccgggaccacccgcaccagcgggaccagcagctgatggccccattgaggatgacgaagacgccgaaaacgaagacgatgatgacgtcggctccgccaccggcacagaagacgatgacgacgacgaagatgacgacgacgaagacgaagaggactcagcagacgaaggtgaaggtgaaggcgacggcggtgacgtcggcgaggaggaagatgaagatcacggcggccaggaggcggagggggtggtaccacaaccagcagcaccacaaccaccaaccccacaactcttggatgaccccctccttaaaaccgccctcatgtcttctaccatcctctggatggtaggtatcggttttgcggcgttgacttactttttactcaag

SEQ ID NO: 245 - DNA, 1269 bp, Plasmodium falciparum
aaaaaatccaaatcttctgttgacttgttgcgtgtactgaatatcccgaaaggagattatgaaatgcctacgttgaaatccaaaaataggtacataccatatagaagtggttcatataaaggcaaaacatatatatatatggaaggagatagtgatagtggacactactacgaagatacaactgatattacttcatccgaaagtgaatatgaagaattggatattaatgagatatatccgtatcagtcaccaaaatacaaaacattgattgaagtggtactagaaccatccaaaagtaatggtaacacaccaagtaagggtgatggtaacacactaggtgatgatatggtacctaccacgaatacatttacagatgaggaatggagtgaattgaaacatgattttatatcacaatatatacaaagtgaaccactggatgtaccaaaagttggtgtatcaaaggaattaccaatgaatataggaggtaatgttttagatgatggtataaacgaaaaaccttttattacttctattcatgatagggatttatatactggggaagaaattaaatataatattaatatgggtactaatagtatggacgatccaacatatgtatcaaataatgtatattctggtatcgatttaattaatgacacattaagtggtaatcaacatattgatatatatgatgaagtgctaaaaagaaaagaaaatgaattatttggaacaaattataagaaaaatacatcaaataacaatgtagctaaattaacaaatagtgatcctattatgaaccaattagatttgttacatacatggttagatagacatagagatatgtgtgagaagtggaataaaaaggaagaattgttagataaattaaatgaacaatggaataaagataatgatggtggtgatataccaaatgataacaaaaagttgaatacggatgtttctatacaaatagatatagatgaaaataaaggaaagaaagaatttagtaatatggatacaaacgtggatacacctactatggatagtatattggatgatttggaaacatataatgaacctttttatgatatatttgaggatgatgtgtattatgatgtatatgatgaaaacccatttgtggatgatatacctatggatcataataaagtagatgtacctaagaaagtacatattgaaatgaaaatccttaataatacatccaatggatcgttggaacaacaatttcctatatcggatgtatggaatatataa

SEQ ID NO: 246 - DNA, 1713 bp, Plasmodium falciparum
aatgtacctagtattgaagaaaatacatattcaagagatatattagagaagagattttttagaaatttgtatgaagatgagttaataagaaaggattcaagcaaagttaacactagagaacatggaggtgaatcaaaggtattgcatttgagcgatataatatctgaagttctaaaggattctggtatgagtagaagcaatgttagaagtactaataaggttgatgttatttttgataagaaaggtgtgaaacctaatgtatatgaaaatatagaagtggaagaagatcctaatgaaaaagtaatatattctgttgagatatgtagtaagcaagttagtgattctaatagtgctgatagtaaaatgaaatatggagaacaactaaataatgattttatggggaatataaatgaacaagagtatattactgggaaattaggagtaagaagaggattaaaaatttatgatcgtaaaaaagaaatagaaaaactaaaaaatgaattaaaatttttaaataaactcaagtatgaaaactttgaagagtatgcaaaatataaaccaaaaagaaagccaagtgaaataaatagcgatatagctgaaagaaaagaagaaagagaggctgataatgcaaaactatcaatctttgaaaaagaaaaattagatatcgaagaaactaaaaaggatgagaaagtagcattagaaaaaagcactgacaatattagtaatattaaatcaaaagtggtaggaataaaagaaattgacgaagaaggaatggaaagcatatcaaaaacgattgataatagtaaaacatcagaagttgttgaagaaaaaaaaacagaagatgttgattcattaaacgaatgtttatatttttatccaaatgatggtgatagtatgaatttagaaaatgtgttaaaacatattatggaatatgataattctgaaaacacaatagatgatctaagtgaagaggaaaattataatcaattatttaatttattatatagggctttccagaataagttttataatatatttaaattacatgaaatgttatatcgtgatttgagcaatgtttctatatgggatgaatatgaattagatttatataatgtaaaagaaaatggtttgtatactgatgataaggatttggaactaaatgaaaacatattgtctttaaattctaaaaaaaatgatgtgaataccttaagggatatgtggaatcaaataaatagaaatgaagagaagaaaatttcagttacaatataccgtttaaattcactttatacgaatttaaaaaataaatatgatgtacctgttttccattcaactaatgaattgaataatgcttatggaaaatttttgattcatatgaattatataaaatcatattttaatggaatttttaatgaatggattaaaactagtgaagggaatatcaaagaatatagaattcttataatcgcatgtagattaatatggagaaaattaaagaaaaatactttacaatcacttgaacacattataaccaaaacttttgaaaagaaaattaaagagcatgaatcgtataaaaagtatcttgctcgtttgtataaagcaaaatatcaacaagaaaaacataattactcttggatgaaatttcttgatgaatataaaggagatggaagcagttcttatgaaaatagtattacagaagctccttatataggttaa

SEQ ID NO: 247 - DNA, 990 bp, Plasmodium falciparum
atgaaaacaaatatcttctcatgcgtgatatccttttttattttgttgcttttttgtaaagcttacaatacttcgtccttactagaaaccataaaacatgatcttcaaattgtaaataattccaactttaatacagtagtaaataagtttaggaatgaaaaagtgtttgcagttttattttttaaaaagtctaacaagaatataaaaaatgtaataaaaaattataatgatgtagcatcgaaatttaaaggaatattaacattatgtgttgtcgattgtgatgaaaatgcatccttatgtgaaaatgaattatcattatatgtaccagattataagagcagtaatacacatcacttcttaatctatcctataaatccaatgccaaaatttgtatttaaggatgaaataacagaaagtaatattaaaaaatatacatatttaattccttcaaaaattgatattattaaagatacacaatcttttaatgtattcttatcaaaacatgaaaatatgccaaaagtacttatatttagtaataaaaaaaaacccaactatgtacttaatgcattaagtaatagttttaataaaaaattaatgttcgcatatatcaataatgaaaatgaagaattagttgctaaatataacgtaaaaaacctaccaaccatattattactcaaaaaaaataaagttgtcgatacatataaaggaaaacaaaattatattaacatatttgattggcttaatgtatactctgaaacttttgtcctaggaggtggtttcgatatatctccagataaaactaatgaaaaaccatggaaatttgaactaattccaaaatttacaaaattgtcccatggagatatatgttttaaaaaagctgacaagggattgtgtttaatctatttgaaagaaggagaaaagttagaaaaaagtgaaatagacatgttactctccttaaaggaaaaattcaaaccacacatagacggacgg

SEQ ID NO: 248 - DNA, 207 bp, Plasmodium falciparum
atgatccttaatatatatatatatatatatatacacctatttatgttaatttatattataggtggtgcagcagcagttgttgctttaacatatatgttaatgaaagacgaagataatcatgatgataatgatgatgaaaatgataaaaaaaaaaaaaaagacaataaactatccaaagactcaaatagaattataaaaggagattcg

SEQ ID NO: 249 - DNA, 207 bp, Plasmodium falciparum
gttcatgctcttgagaacagagctattatggcctggtgtggagcacaaattttttcccaggctgaattgagagaatcacaaacaggaatatggatatcaaaagaagagtatgaagaaataggatccaacatttttttaacaaaggcaaggaaaaaaaaaaaaaaaaaaaaaaaaaaaaaaaaaagaattgatattagtgtgcattag

SEQ ID NO: 250 - DNA, 690 bp, Plasmodium falciparum
atgtccaaagataagagaaactcgtttgcatccaattcttttgattctagcaacgacgaaaaaaaatctaagaatggaaataaaatttataaatcaaaacatgaagagaatagtcctgatggtgattcatataaaataaataataacgaaaaagagaaaagtaaagaaaaattaaaaaaagatcaaaagaaaaaatctaaagaaatttataattcatttaattctcctaattctactagtagcgattcggatggaaatggattacatctaaatttttccaacgcatcaagtaatatttttaatatatatgctatatgtaaatatccgtattatatatgtagcatgtatatcttttttaaaaaaaagataataaatatatatatatatatatatatatatttggtttattatgtaggttcgagtagtgaaaacggatttaagatactacgaacacaagaaaatgaggataaacttctagaagaaagaagaagaaaaagagaagcattaaaagaaaaattaaaaaacatggttaaggaaaatgaacaaaataatgatgcgaatgaaatactacagaatgatcagataaataaagattataacaatgaaacttttttgttaagtgaaaataaaaatgataatgatataataacaaatgaaataccatctaatccatcatatatcgaccaaaat

SEQ ID NO: 251 - DNA, 2520 bp, Plasmodium falciparum
tatcattccaataataaaattaacgtaaataatttaaatataaatgatacatgtgtacaattatcactatgtaaacatcctaaacatagtacattcttctcatctattaattataaatcctattataaaaataaaaccaagtgtagtatacaagataccaattattataatgctcattattcaccccctttatttaataaaaatggacatatatttattttttgcgacgattattacgtaaaccatgaaaaatataataaaaatgaaaataaaaaatattcctatttatatcctaatgatgatataaaaaaaaagatgatatttaataaagaatctttttttttacctatacgtgaagggaacacttataatcaggaaagagataaagtaacaaatccttatctgaaacaaaaacaaaaaatagatacatatatgataaaagatgaatgtatagaaaaacaagaagaagatcaaaaaaaaaaaaaaaaaaacatttccttatcatgtatattaaaaaaaaatatattatattctgtagttgctaagggagacggattaaaaggtggaaaggtaaatgaatggatatctctttatgttcatacaataaataaagagggagataatatatattatggtaaacatataaatataagaatgaaaatcgaacctattggatatttaaaatcatattattcgttcagttattccaatataagcaaagaaataaaagataataataataataatattatgttaacacaatctaatgatgcaaatataatcaaaaatgaatataataatctatcattaatgtcctcccccatgtgttttcattcttttaatgatattcaagaaatgattaattataaagtagaagatttacagaatggtatatatcaaattttatataaagttaataaaattggaaagaaaaaattatatatatactgtgatggaataagtcttagcagttcgccttttgaaataaatatttgcccatcttcaccttgttctaaactatcaaaggttgtaggaaaaggagtaaccagatgtatatcaataccttatttatatgatataaataaggaatctttttttattaaccacttggaaaaaatagatcggaaatgtaatgggaagaatgatgatttggataatatgaaaaaaatgtataatttgaatgatatgaaaggaacgcataatgtggatgatatgaaaggaatgaataatgctgatgatatgaaaggaatgaataatgttgatgatatgaaaggaaagaataacgctgatgatatgaaagaaatgaataatgttgatgatatgaaagaaatgaataatgttgatgatatgaaagaaatgaataattctgatgatatgaaagaaatgaataatgttgatgatatgaaagaaatgaataatgttgatgatatgaaagaaatgaataattcgaatgacaaggagatatcaaataatatgtgcgacaaaaaggatagttccagtaatggtggtaattcacatattatatctattcaaaaaaatgaagactgtctaaaaataaacaacacaaataataataataataataataataataatgataatgataataatgtagacatatgttttggttataactctgtttgtgatacgtcggatagtaataaaaaaaatacaaatgtgaaatacttatatggtgaggaaaataactacatttttaaaagccctaaatattataacgaaattaatggaaatattataaaattaaatgaaaagaatgaaagaacgtttgaggagtttttaaaaaatatggtacaagtagtaaatacatttgacattattttatatgataaaaatggtgaaaggatatgtataggtaatgataatattaaagttataggaaaacgaggtgcttatataaaaaatgtaatagataataataatggtacttataccgtacaatattgttgttgtgtaaaaaaagatgatataaaaaagataagaaatataaataaagaaaaattaatagatttttatgatgaatttttatttcataaaaataaatattatgataatgttattattaatgaatttaagaaaagattttttaatatatttattaattgtgaagtaaaagtatatataaatgaagaagaaatttatggttctccattttttccaattataataaatatgcacgagattttaaatatatataatttatatgatcaatatacctactcaggaatgttattaaaaaattttgaatatttgttgacttttaataattatgaaggatgtatagagaacttatgtgagttttatgaaacatttgttgatacacaggatgatttaatagataataaaagtggaaagagcaaaacagaaaggttcctatctttatttcaaatgaaaaatgaggagaaaataaatatggataaaaagaattacacaagtttgttttttaatatacctttaaatatatatgatatgaatagtaaatatatggatgagatggataga

SEQ ID NO: 252 - DNA, 1449 bp, Plasmodium falciparum
atggattaccacatggattatattccgaatgaggtaatttctcatcaaggagaaagatttgtcgacaaatatgttgatagaaaaattttaaagaataaaaaatcattgttagttattatttcattatcagtactttcagtagttggttttattttattttattttactccaaattttagaaaaagtgatttatttaaaaactcttcagttgaaaataataatgatgactatataataaatagcttgctaaaaagccctaatggcaagaaatttatcgtctcaaaaattgatgaagccttatcattctatgataataaaatgaaagatataaataaaaacaataacaataatacttcatccgattttaaaggtcttagcttatttaaagaaaacaaaccatcaaataattttattcataatgaaaattattttataaatgtttttgatcataaattcttaatgaataatgtagaacatataaaccaattttatacgtttataaaaactaataataaacaatataattctccgaatgaaatgaaggaaagatttcaagtattcttacaaaatgcacacaaagtaaaaatgcataacaataataaaaagagtttatataaaaaagaattaaatagatttgctgatttaacttatcacgaatttaaaagtaaatatcttactttaagatcttcgaaaccattaaagaattctaaatatttattagatcaaataaattatgacgccgtaataaaaaaatataaaggaaatgaaaattttgatcatgcagcttatgattggagattacatagtggtgtaacacctgtaaaggatcaaaaaaattgtggatcttgctgggcctttagtagtataggttccgtagaatcacaatatgctatcagaaaaaataaattaataaccttaagtgaacaagaattagtagattgttcatttaaaaattatggttgtaatggaggtctcattaataatgcctttgaggatatgattgaacttgggggtatatgtacagatgatgattatccatatgtaagtgatgctccaaatttatgtaatatagatagatgtactgaaaaatatggaatcaaaaattatttatctgtaccagataataaattaaaagaagcacttagattcttgggacctattagtattagtatagccgtatcagatgattttccgttttacaaagaaggtatttttgatggagaatgtggtgatgaattaaatcatgccgttatgcttgtaggttttggtatgaaagaaattgttaatccattaactaagaaaggagaaaaacattattattatataattaagaactcatggggacaacaatggggagaaagaggtttcataaatattgaaacagatgaatcaggattaatgagaaaatgtggactaggtactgatgcattcattccattaattgaataa

SEQ ID NO: 253 - DNA, 1479 bp, Plasmodium falciparum
atggaatatcatatggaatattcaccgaacgaggtgattaaacaagaaagagaagtatttgtaggaaaagaaaaaagtggcagcaaatttaaaagaaagagatctatttttatagttcttacagtatcaatatgttttatgtttgctttaatgttattttattttacaagaaatgaaaataacaagaccttgtttactaatagtttatcaaataatataaacgatgattacataataaattcattattaaaaagtgagagtggtaaaaaattcattgtatcaaaacttgaagaattaatatcttcttatgataaagagaaaaaaatgagaactactggagcagaagaaaataacatgaatatgaatggtatagacgataaagataataaaagtgttagttttgttaataaaaaaaatgggaatttaaaagtgaataataataatcaagtttcttatagtaatctttttgatacaaaatttttaatggataatttagagactgtaaatttattttatatctttttaaaagagaataataagaaatatgaaacatcggaagaaatgcaaaagagatttataatattttcagaaaattacagaaagatagaattacataacaaaaaaactaatagtttatataaaaggggtatgaacaaatttggagatttgtcccccgaagaatttagaagtaaatatttaaatttaaaaacacatggtccattcaaaacattatcaccacctgtatcatatgaagcaaattacgaagatgtaattaagaaatataaaccagctgatgctaaattagatcgtatagcatatgattggagattacatggtggtgtaacaccagttaaggatcaagcattatgtggatcatgttgggcttttagtagtgtaggttctgtagaatcacaatatgctataagaaagaaagcattgtttttatttagtgaacaggaactagttgattgttcagttaaaaataatggttgttatggtggatatataactaatgcttttgatgatatgattgatcttggaggattatgttctcaagatgattatccatatgttagtaatttaccagaaacttgtaatcttaaaagatgtaacgagagatatacaatcaaatcatatgtatctataccagatgataaatttaaagaagccttaagatatctaggacctattagtattagtatagcagcttcagatgatttcgccttttatagaggaggtttttatgatggagaatgtggagcagcaccaaatcatgcggttatacttgtaggttatggtatgaaagatatttataatgaagatactggaagaatggaaaaattctattattatatcattaaaaactcatggggatctgattggggagaaggaggatatattaatctagaaactgatgaaaatggatacaaaaaaacttgttcaattggaacagaagcttatgtaccattacttgaataa

SEQ ID NO: 254 - DNA, 1455 bp, Plasmodium falciparum
atggattacaacatggattatgctccccatgaagtaatttctcaacaaggagaaagatttgttgacaaatatgttgatagaaaaattttaaagaataaaaaatcattgttagttattatttcattatctgtactttcagttgttggttttgttttattttattttactccaaattctagaaaaagtgatttatttaaaaactcttcagttgaaaataataatgatgactatataataaatagcttgctaaaaagccctaatggcaagaaatttatcgtctcaaaaattgatgaagccttatcattctatgatagtaaaaagaatgacataaataaatacaacgaaggtaataacaacaataatgctgactttaaaggtcttagcttatttaaagaaaacacaccatcaaataattttattcataataaagattattttataaatttttttgataataaattcttaatgaataatgcagaacatataaaccaattttatatgtttattaaaactaataataaacaatataattctccaaatgaaatgaaggaaagatttcaagtattcttacaaaatgcacacaaagtaaatatgcataacaataataaaaatagtttatataaaaaagaattaaacagatttgccgatttaacttatcatgaatttaaaaacaaatatcttagtttaagatcttcaaaaccattaaagaattctaaatatttattagatcaaatgaattatgaagaagttataaaaaaatataaaggaaatgaaaattttgatcatgcagcttatgattggagattacatagtggtgtaacacctgtaaaggatcaaaaaaattgtggatcttgctgggcctttagtagtataggttccgtagaatcacaatatgctatcagaaaaaataaattaataaccttaagtgaacaagaattagtagattgttcatttaaaaattatggttgtaatggaggtctcattaataatgcctttgaggatatgattgaacttgggggtatatgtacagatgatgattatccatatgtaagtgatgctccaaatttatgtaatatagatagatgtactgaaaaatatggaatcaaaaattatttatccgtaccagataataaattaaaagaagcacttagattcttgggacctattagtattagtgtagccgtatcagatgattttgctttttacaaagaaggtattttcgatggagaatgtggtgatcaattaaatcatgccgttatgcttgtaggttttggtatgaaagaaattgttaatccattaaccaagaaaggagaaaaacattattattatataattaagaactcatggggacaacaatggggagaaagaggtttcataaatattgaaacagatgaatcaggattaatgagaaaatgtggattaggtactgatgcattcattccattaattgaataa

SEQ ID NO: 255 - DNA, 2409 bp, Plasmodium falciparum
ccattggataataaaagcaaaattgtaaactctgccgaagttaaggaaacattagctttagctgaagctgctgccaacaagtacaaaagccccaaagtggatgttgaacatttgttaagtggattatcaaatgatgaattagtaaatgaaatttttaatgaagtttatttaaccgatgaagccattaaagcaatattaaaaagaaaatttgaaaaaacgaaaaaggataaagatggaaaaaccggaactttatacattgaacaatttggttccaatatgaatgaaaaagtaagaaatggaaaattacaaggtatctatggaagagatgaagaaattagagcaattattgaatctttgttaagatataataagaacagtccagttttagttggtaatcctggtactggtaaaacaacaattgttgaaggtttagtatacagaattgaaaaaggagatgtaccaaaagaattacaaggatatactgttattagtttaaattttagaaaatttacttcaggaacatcatatagaggagaattcgaaacgagaatgaaaaatataattaaagaattaaaaaataaaaaaaataaaattatcttatttgttgacgaaattcacttattattaggagctggtaaagccgaaggaggtacagatgcagctaatttattaaaaccagttttatctaaaggtgaaataaaattgattggtgcaacaactatagctgaatatagaaaatttatagaaagttgttcagctttcgaaagaagatttgaaaaaattcttgtagaacctccttcagtagatatgaccgtaaaaattttaagatctttaaaaagtaaatacgaaaacttttatggtattaatataacagataaagctttagtagcagcagcaaaaatatcggatagatttataaaagatagatatttaccagataaagctattgatttattaaataaagcttgctcctttttacaagtacaattatcaggaaaacctagaattattgatgtaacagaaagagatatagaaagattgtcatatgaaataagtacattagaaaaggatgtagacaaagtatccaaaaagaaatataataaattgattaaagagtttgaggagaaaaaagaacaattaaagaaatattatgaagaatatgttattacaggagagagattaaagagaaaaaaagaaattgaaaagaaattaaatgatcttaaagaattaacacaaaattatgtatattcaaataaagaaccacctatagaattacaaaatagtttaaaagaagctcaacaaaaatatttagaattatataaagaaacagtagcttatgttgaagcaaaaacacacaatgcaatgaatgttgatgcagtttatcaagaacatgtatcatatatatatttaagagattctggtatgccacttggttctttatcatttgaatcatcaaagggtgcattaaaattatataatagtttatctaaatccattattggaaatgaagatattataaaatcattaagtgatgctgttgtgaaagcagctactggtatgaaggatccagaaaaacctataggaacctttttatttttaggacctacaggtgtgggtaaaactgagttagcaaaaacattagctattgaattatttaattcaaaagataacttgattcgtgttaacatgtcagaatttacagaagctcactctgtctccaaaattactggtagtccaccaggttatgttggtttcagtgactctggtcagttaaccgaagcagtccgagaaaaacctcactccgttgtactttttgatgaattagaaaaagcacatgccgatgtctttaaagtattattacaaattttaggagatggttatattaatgataatcatagacgaaatattgatttttcaaataccattattattatgacatctaacttgggagcagaattatttaaaaagaaacttttctttgatgccgacaattcaggtactccagaatacaaaagagttatggaagatgtcagattatctcttataaagaaatgtaagaaagtattcaaaccagaattcgttaacagaattgataaaattggtgtatttgaaccattgaataaaaagaacctacataaaatcgttgcattaagatttaaaaaattagaaaagagattggaagaaaaaaatattcaagtatctgtttctgaaaaggctattgattatattatagatcaatcatatgatccagaattaggagcaagacctaccttaatatttattgaaagtgttattatgaccaaatttgctattatgtatttgaagaaagaattagtagatgatatggatgtatttgttgattataatagtaaagctaaaaacttggttataaacttatctaagacctaa

SEQ ID NO: 256 - DNA, 2064 bp, Plasmodium falciparum
atgaaacatacaaaaataaccaaatatttgacaattaatttttttatcctactaactttagtttttcaaaaatattcaagttgtcaaaattcgttgaattatagtaaaaataactatggattaaatgaccaagagctccgagcaatgctatttggtcttaattatgatccatctaaaaggaataaaaataataaagtaaatagagatgttataaaaaatgaatcatcattattattacgtaatcttatcaatgaagaaactctaagtgaaaaaaatgacaaagttgtaaatgatattaaaaatatgaataatagcacagagaaaaaaataaatagtatatcaaaaggaaataataatatacataatataaatgaaaatcaaaatgcaaatgttgaattaaaaactgataatatactagataatacatcagaacaagacgatataaacgaaaaaaataatgacaatggtgatatggttcataaaaatatttataataatatacttagtgatccttatgatattaatagcaccaatgcatacattaataaaagtgacataactaatttaaattattcttcaaatgatgttataaataatgataaagtcaataaatcttatgaagaaaaaaatattgttaataatacagagttaaataaattaatagaatccgacgaccattcaaataaaaacgatattaataaaaaaacagaaaaaaataaaacctttaattcatcatctacctcagatgaaaaaaagcaaacagatataaaaggacaaaataaaaatgatttaaataatgaacatatttttaataacaatgatattaataataatgtacaatataaaaataaagtaaatatcatatctgtagacaaaaataatacagatagagataataacaatttatatgaaacaaataacggtgatttaaaatataataatgatttaattaaggaaggggaaaataaaagaaataataaattaaataattataaatttaatatgaataaagtaaatgataataaaaactttaataagtatacagaaatatataataaggaatcagaaccagaaaaacaaaataatagtaacaataacttaggaatacctacattgataaagaaagaggtgcatattaaaaatcacaatacattttcatctaatggaaagatcttagaaaacaaagacattgataaaatgtctgatacatcaaaaaaaaatgatagaaattttagatcaaatgatattaaaaattttaagaataatgatacaaaaaataatgcaacattatcagaggataataaaaacagatataacattacaacgaataaaaacaatgaaaaaaaagaatacaatatgaagaaatcaaatgaaaatgaatatgcttttaatacagaaaaaacaaatgtaaataatgacgcattgaaagaagaaagaaataactacaaatatttgaataatcaaacagatgtaaatatcaataatttacaagaaagagatataaatttatacaacaaaaatgaatcagataaaaaattggagcaatcgtttagggaagaagacattaaaaatgcatatttacctgaaaataaaaattttcaaaagacattaacaaataacgaaaaaaatgaagataataaaatacctcatattgatccttctaataatgaattagataaaaaaggaaattacaataaatatgaaatcggaaaaataaaaaaaaataacgaagaaaataagcagaatgttacagtagaggaaaatataaaccctgaaaaaataaggaaagatcatgaacaaaatattcaatattccaaaaatgatccaataacggatattcaaaattctacaaatgctgtattaaaaaaaataaaaccaacagaatttgaaaactatacaaaggaagaattacaaaatgtttcatcttcagaagtaagagatgataatttaaatgaaataaacagaaagggtgaaacaaatatgttttcagaaaaatcgactttaaaaaaaggggaaaatgattggaatgaatatgaatattttaaattgaaaagtaatgaatta

SEQ ID NO: 257 - DNA, 2055 bp, Plasmodium falciparum
tttctttctgattacactacttgttcagtgaatgcgaatattatgcatgatgcaatatcatatacattaagcatagaatcaaatggttatttttttgaagagttttttaacaagatacaggaattgttatcattaaaagaaattccttctcgtgatgaatataatgaagcttatgatgaactaaatataattatacaaacagatacaacctctggagtagataagtctttaaaaattatgtattcgttatttaacaaatatactccaactaataaagaaatgtatgatattttgaatgcatattttttttatccatcatataatgcttatagaacatatgtaaatgaatattttcttagaaattatgttgtcatttttatatatggaaatattatcatatcagatttaaaaggtgaagaaaatattaccaaaaataataataacatttttgataataagaaaagtatgaactataatgaaggtgatgcaactgataaaaataataacagcaataataacaatgttgaaagtgctaatgatagcaccaattattatatatataatgaaaataattcttccaatagagatacaaataagtacactgacaatgattataataataataataataataataataataataaggatggtgataaatatttaataaatgaaaaaatttatgaaggagaagaaaataaaaagaatcctactacttatttaaagaaacaggaacagtttttggaaaaacaagaaaataataataaggaagaagaaaataaatcaaaatcacttcaaatatcttataatggatcaggaattgaatatttagtaaaattatgcgaatcttttataagcaaagtaacaaataaggttataaaaaaaagtgaatctacatattatacaaagaaattaattaatgatgaagatattgaaatagatatgcatgaccctggacaagatttaagtaattcaataacagtatcatatataatagattcagaaactttgttgaataatgttttaataaacattatagttgatttaatttcatctgattttattaaatttgttaaaataaaatataatgatggttatgttgttgaggtaagaactttttttacatataatggattaggtggattactttttataattcagagttttgataaagatgtagaacagcttgaatcagatatatgtacatttgttaaatatattacatttcaattattaaatattgatatatcagatttgaagaagcagttgcaaaatatgaaagaacattatataatgaataatactatattcacatttaatcaagaatattcatctatattagatgaattaattacaggacatgaatgttttgacaaaaaatataaaattgtacaaatatttgatgaattaattaattgtcctaacattattctaaataagataaattatattttaaggaaatcaaaaaaaaatatatttaaagaatataaaaaaacaaacatagttaatatacaaagtagtaataaagatggaacaaaaggtcatgattatttacacttaaatgaaaagtgcaattattcatataggaaaaatatgaaaatgtctaatatacaattttcggataattcagaattatttattaaaaaacaaagaaaaaagaaatataaatatattccaagtaatggaacaacacaatcaaataatatatataaaaaggaacacctatttaatttctcaaattttgttgaaattaaagaaaagggattttttaaatatattattagctactttaggaaaaataataggaaatatttgaatgatgataattatttagatttcgaaagctgcgacgaagaaatgtcgaaagacaactttcaaatattttacaacttcacaaatgatataaataaaattagagaatattttcgtgggaagtttactaatgataaggaggtaaaagaaaattgttctatcaattatgaagaaattagaaaatattgttatgatcataatatcaataaagataacatgataagaacaaaaatagagatatga

SEQ ID NO: 258 - DNA, 2619 bp, Plasmodium falciparum
aataacgtaaaacatactaataataccaataataatgatacacatataacagatacactaacacatataaatgaaaataatgatactagaaataattttttaaaagtaaaagataaccataagattgtagattttataaatgaaaataaattgaaatttctagattatatcgatcctaatatcatgaagaaattaagaaattatatcaacctcttaaatacagaagaattaaatttaaaaaacaaaaaagataacaaaaaaatagatgattcaaataaaaaagatttattaggaattaaaaaaaaaagaagtgaagataaatttcatttagataataatttagagaaagatgagaaaaaaattgaagtaattaaaaatttattaattttttatcataaacttaaaacggtttgcttgtctaaaaaagaaaaagaattaaaagatgaatttataaaagaagaaaaagaaagtattaagaaattaaaattaaattataataaatttgtaaatatcaaaaagaatttagaagtatctaatgtttatttacataacaatggatatgattcatcattaaaagaacttgaaactacaaaaaaatatcttatagaaataaaagatgaagttacaaaaataaaacaaatatcagataatattattaaaatagataatgtagaagaattaaataaagatattgaaaatttaaataatgaaattcatgaaattgaaaagatgtggctatttattaaaaaaaaagaagaaatattaaatgaattttttttttgtccttttaaagatttagatgtagaagattttgatatacaaataaaaaaattacaaaatgatttcaaaaaaattaaagtagatagaaaacataatatatgtaaagaagaaacattaaaattaaaagaaattataaaatttatttctgttttgtgtgaaattaaaaaaccatttataaaagatagacatataaaagaaatggaaaataatataaatgaagaaaaagaaaaaaataaagaagaagataaaataaatataattatagatgatagtacattaactatatatttctataaattaaatattatgaaatatcatgatactattgaagaagttattataaaagcatataatgaaaaaataatagaagaaactattaataaatttgaagattattgggataaaatatattttaaaaaaaaagaatataaaaataatatactattaacatatatagatgatatatgtatagacacaattgaagaacatcaagttactttacaaaattgtttttcatctaaatattttcttttcttttcagatgaattaaatttatggcaaaaaaaaatatccaatatatatgaagtaatacaattattaaaagatatagaaaaattgtggatatatttacaaaatatgtatatatattcagaagaagtaaaaaaggaactacctctctattctaaattctttttaactattaatgatgaatatcttgaaatgttaaaacaaattattgataataatataaaagtagtagatttttcaaatgaagggggaattatagaaaaattagaagaattaaaagtaaaattatgtaaaagtgaaaaaccattgaatgaatatttagattctaaacgtaaatcatttcctagatttttttttatatcttctactgatttaatagatatattatctaatggaaataattttaaacttgtaaatacacacgtacaaaaaatatttttatccattagaaaatttgtaacaaaaaatgaacaattaacagataacgaaatacaaaatgaagtgaaactaaataatcaagaaactattacagaagaaaagaataaaaatgcaaatgaaaattctaatgaaatagagacaaataaatataataagaaggaagaattaacgaataatagagatggtgatggtgatgatgatgataatataaaaaatgataaagatgaaaaagatgaaaaagaagaaactattatcaagttaatttcgtcttatggagaagaaatatgtaattttcatgaaggtctagttttgaaaggtaaagtggaatgttatttaaatgatataatagatcatattaaatatacattaaaatattatattacaaatttatttagattaaaagatttatttaataatgaaaaagaaaaatggatagatgaaaattatttagctcaagtatttattttatgtaatactatattttttgtaaatgatgtggaaaatatattaattaaaaaagatattaatatatatgaagaattaaataaatattataaaaatcatattcttcaattagaaaatgttattaaaaaagttcaaaaaaaattaactataaaaaatagaatcaaaattatgtgtattattacattagatacattttatagagatgtacttgaagttatcctaaaaaataaatcttctatttctataaatatgttcgattggcaatctcaaattaggatgtatccattttttaaaaatcaaaaaatttacgaacagaatgaaaaccaaacggaagaatcaaacttaaaattggataataaaaatttagataatgaacaccaagaaggaaaacaagaatataacaacaaa

SEQ ID NO: 259 - DNA, 2619 bp, Plasmodium falciparum
aaaatattaaatacaaaacttatatcttgtatgaattataatagaggcaattttactattaatccaagattaattagacacttttttatattaaatattaattttccagaaaataatacagtcaatagtatatttagtgttttattaaaaaatcattttaataattttaaacaagatgtatctgatttaattccatctatattaaaatctactatatctttattttataatattgaaaagacattcaaaagaacagctacttatttttattatgaatttaatttaagagatattcatagtatagttaaaggattacttactacaacacctgttacatttcaagattgtgataaacttttatttttatggttacatgaatgtgaaagggtatattcagataagcttaataaaaaagacaagaacaaatataaaaagattattactgatataataaaaaaaatgtataataaatatgaaattaataaatttgttatgaaatatgacagtactttattattttcaaattttcataaaggtagtcatgataaaacatatgacatttgtaaaaacatggaagaattaacattattcttaaatgaagaattaaatgaatataataattcctataatgtaaatattgttttatttagtgatgctattaaacatatttgtaaattaattagaatagtagataatttaaaagcacatgccttattattaggtataggaggatgtggaaaaacaaccatatctaaattttcatcttatatatcatcgaaaacattttttgaaatggatttttctgcacattgtactgataacgatatcaaaaaatatttacaaaacatttttcataaatgtgctatgaaaaatgaagatattgttttatttttgaaagaaagtaaaatacatgatactttctttatatatgtaaatgaatatatgtgttcaaataatattatagacttatatacaaaagaagaacgagattatataatacataatattagaaatatagctaaagcagatggtatagaacaatcagataataacatattcgattattatattaaaaaagtaaatgataacttacatttcattttatgtttttctccaactagtaataattttagagataaatcaaacaatttccagtgtatattaaataatactatgatagatatatatgataattgggaagctgattctttaatgtgtgtagggaaaaattatgttagtaatatatatatgaatataaatacgggggatattttattagatcaagaatatattaatttaaaaaataaaaatatagaaaaagatataactttgggaaacaaacaaatagagaaaaattatatccctacaatatcaacaaacgatggagatgatcattataaagacatggataaaacaaatatgaaaaatggggacattacaacaacgataaataatattcctattgataataataataataataataataatagggataatattgatggtaataattttttcaaaaatagagaaggaaatgatgaaaacatgaaaagaaaagtttatagtaataattttacgaaccaaaatgatctcaatacaaatattacaaacaataataataataatagtaataataataataataatatttatgataaaaatgatagtatactaaaggaagaagaatatgtaaacctaaaagatataataactgaatatctaaaagaatgttatgaagacctattagatatatcatccttttattattctcatgaacgttcccatatttatataacccccaaattatatcttgaaagtatcaaaacatatcatataatgttactaaaaaatattactaatataaataataaaatgaatatgcttaaaaatggtatcacaaaaatgaatgaaacaagttcaaatgtagaaaatataaaaaattgcttaaaagataaaaagaaaatatcagaagagaaaatggaagctgctgaaaaatatgcaatagatattggtaatgaaaaaatggttgtaaaaaaagagagtgatttagctgatatagaagaacaaaattgtttagaaatacaaaaaaaagttcttaaacaacaagaagaatgtgaaaatgatataagattaggtattccattaatagaacaagctgaagaagctttaaatactttaaataaaaaaaatattcaagaattaaaaactttaaacaaaccacctccaggagtagaagatattactgcagctgttatgcaattattagcaacaatcgatacaactatatctatagataaatttggaaaaattaaagatcgaagttggaaatctgcacaaaaaatgatgattaatcctgaaaaatttatatccttacttaaagattataaaaataagattgatgaaaatttggttcctgattgtaactttaaatatgtagaaaatttaattaatttaccacattttaataaaaatgcaatacaaaaaaaatctaaagctgctgcaggattagctgaatgggttttaaatataacatcgttttataaaattattcaaaacatattacctaaaagaatcttattagataatacaaaaaaaggtttagaagaagctaatgaa

SEQ ID NO: 260 - DNA, 2610 bp, Plasmodium falciparum
ataagcgaagaagaggaagaaatttttattaatcctaaatataaattaagtaataataatataacaagtattagaaataaaaaagagaatgaaagtatggaaaaaaaattaatgaataaatcatttattaatgaagaattatatgaagattgtaagaatctagaaaatttaaaagattttgaaaacattactgaaagtttcgaaagtgaaagtatgtcatggaaacaatggtttttaagtgaaaaagtagaaaatgaagaattacctagaaaatataataatataaaagatttttctaaattattattaattcgagttttacgtaaagatagatttttaattgcattaaaaaattatattacaaaaaatataaaaatgacaaatgatgaaaaaaataatacatatgcattagaaaatatattagatgaatatattgataataaaacacccgtcttatttttgttaacaactggttatgatccttctaaagaaatagaagattatataaataaaatgaaaaataatgctattaaaaaaaatgatagtaataaaaaagaatccaataaaaataatatagcttatgtaaacatatctatgggtcaaggacaagaaaatattgcattaaaatatttaaaagaaatatcaaaatgtggaggatacatatttttacaaaatattcatttaatgacaaaatggttaaaagaatttgaagaaattctggataaaatatttttagatgctcatgtaaattttcgtttattcttatctgcagctataccaaatgaaaaagataccaaattattacccgaaaaattattaaagaaatgttttagaataaataatgaaaaatcatatagtttaaaagataacataaaatgttgtcttgataaatttgaaaacggacaatatgatgataaattaaaaacagtaatattgggtctttcttattatcatagtttattattaggaagatttttatatggaaaaatcggatttagtcaatcatactcttttaatgataatgatttagaaatatcatttaatattattaaaagatatttaaaaacatatgaaagttttcctttagcagatgtattatttttaataggagaaattatatatggtggacatataacagatatatgggatagacgaataaataagacatacgttaagaatatacttaaagagatatatagaaatataataagtataaatgaaaaaaataaaaatattaatatggattttcatcaccccaatgatagtaataataattataatgatgatgataataataatagtcataaaaataataaaaataataataataataataataaggatgatgatgatgaaagtaataatagtaatgataacgaagaagaaaatgaagaaaaactcattttaaaaaataccaaacataatattctgttcgatgtatttaagtttccggattgtagtaaatataatattaatcaactaaaaaaatatatagacgaaaaattgaataaagaacaaacttatttattagggttacacataaatgccgaaattgaatatatgaaaaatgaatgctcacgaatattacaaactttacaagaactaagtaataaagaaattgcatcaacagaaagttataaaaaaaatacgaaaataataaagaaagaaaaacctggtgataataaagataataaatatacacatgatcaaaaaaaggaaaccatacataaagaggaagatgatgaagatgaaaaacattcaggaagtaataaaagtacaaaaattatatatgatataattaatcatttattaaatgaattaccagataaaattgatacaaatgatttaaaaatagaggatagtcaaacaaatacatttatggtaatagcattaaaagaagcagaaaaatttaacaaattaatagaatgtattaatgatacattaatagaaattaaattagtattagatggtatattaaatatgaatgataaaattcaaaatactatcaaatcattaatgttacataatataccacatatatggataaattattcttatccatcaaaaaaaaaattgatgccatggtttgaaaattttaaattaagaataatatttataaaagaatggatttctaaaataagaaataatatatttctaccaaattctgtatggttatctgcattatttaatcctatctcatttctaacagctattaaacaaaaatttgctcaagaaaataaagtaccaattgataaactcaaattaaaatggcaagtaaccaatataacaaaattagaagatttaaataataaaaataatgcattatatatacatggattatatttacaaggagcttcttggtttattaattcgaaaaatgatacctttacattcgataaggataatataaatgataatgtatcttatggaaacataatagaatctgtacctaaacatatatattattctatgccattaatttatgtatattgtattagtaatgaacaagatgaactcttaaaagaaaatatggaatatcgttcattggatacacctctttatgtgacttcagacaggggaaatacttttgtttgttcaatagatctaaat

SEQ ID NO: 261 - DNA, 768 bp, Plasmodium falciparum
atgaatgaaccttttagtttcaatgtaaatgctccttcgtattatcctggaatgaaatataagggagcaggggcagaggaagatgatgaaaacaatagtaacctcgacaatacaaataatgagaataatattaatatgaacaatgatgttaataatgatttggataaaattaaagaagaggaagatataaatggttccgaaattgtcgaagatgaaaatgttaatgatatagaagaaaaaataagcaaactggttttgaatgatgataatgatattatgaaagacgacgtagaagaattacaagaaaaagtagaagataaaaaaataaaaatggctgaagtagacccaagaccacacttaaatataatttttattggacacgtcgatgcagggaaatcaacagcttgtggtaatattttatatatattgggatatgttgatgataggactattgaaaaatatgaaagagaagctaaagaaaaaagtcgagaaagttggtttttagcatttattatggatattaatgaagaagaaagacagaaaggtaaaacagtagaagttggaagggcacactttgaaacgaaggatagaagatttacaattcttgatgcacctggacataaaaattttattccaaatatgattagtggtgctgcacaagcagatattggtgttttaattatatcagcaagaaagggtgaatttgagacaggttttgagagaggaggacaaacaagagagcacacattgttggcaagaacattgggt

SEQ ID NO: 262 - DNA, 381 bp, Plasmodium falciparum
atgaaactagtacattttttgatgaaattgacaaacgaaaatgtaactatagaacttaaaaatggaacattaataacagggataataacagcggtagacataaaaatgaatacacatatgaaaaatgtgaaggttgttataaaaaataaaaatatagctgaatataatgtaaataccaaacaatttttatctttagagcatgtaaccataagaggtaataatataagatattttattttatcggatagcttacccttggattcattattagttgaagatacaacaccaaaaaaaatatctaaagataaaagctttttacatcgagataaaggaatgtccaaaggtgctaaaggacgaggaagaaaattatcaaaaagataa

SEQ ID NO: 263 - DNA, 1545 bp, Plasmodium falciparum
gatagtttacaaagagtatatggtataagttttcaaaaaaagagtgaattagtagaatatttaaaatttttagaagaagctaaaaaaagagatcatcgtaatgttgggaaaatattgaatttgtttttttttgaaaaagaaacatcaccaggttcatgtttttggttaccacatggttcaaaaatatataataaattaatagaatttataagaaaagaatatcgtataagaaagtatgaagaagttatatcaccaaacgtatttagttgtgatttatggaaaacatcaggacattatcagaattataaagattgtatgtttttatttaacgttgagaataaagaatggggaatgaaacctatgaattgtccaggtcattgtttaatgtttaaacaattaaatgtttcttatagatcattacctgtacgtctagcagattttggagttttacatagaaatgaaatatcaggaagtctgagtggattaacacgtgtaagaagatttcaacaggatgattctcatatcttttgttcaatggaacatataaaacaagaagttctaaatacattaaattttctcttttatgtttataatttatttggattcaaatatgaattattcctttcaacacgacctaagaaatttataggacaaatatctacttggaatctcgcagaacaacatttaaaggatgctctatacgcagcaaatgttcagtggaaaataaatgaaggagatggtgctttttatggaccaaaaattgatatactagtaaaggatagtttaaatagaacacaccaatgtggaaccatacaactggattttcagttacctgttcgatttaatttacaatataaaaataaagaatatgtaactaataacgaaaaaaatgaaaaaaatgaaaaaaatcatgacaatgatgataatgtacataacaataataattatcctattaatcatgatgatcttcataacaatgaaaagaaagaatttaaagattcacaaaatcataatgaagacaaagaacataataatatacatgataatcattcgttaaagccaaatataaatgaagaaggattattaaaaaaaggatttgaaagacctatcataatacatagagctattttaggttctgttgaaagatttgttgctatattaatagaacatacagctggaaaattacctttctggttatcaccaagacaagctattgtcttacccattggtgataaatataatgattatgctaattatgtatatgaaacattgcataataatatgtttgatgtagatctagatacctccgtcaatacattaaacaaaaaaataagagaagcacaattaaaacaatttaattatattctagttgttggtgaaaaggaattaacaacgaacactgtaactttaagggatagagatgatcaaaataatcaacatgtctataccattcaagaattaataaacaaatttaataagctattggatgtaaactctaagaaatttaaccaaataaaggaatttaactcaaaccaaaccatttaa

SEQ ID NO: 264 - DNA, 1881 bp, Plasmodium falciparum
atggatatcgagaattcaaaaaaacacctaagcgaattacaagaagaaagaagaagacacaaaattacacttcccgatatgtttaaaaggaaagttcttataaaggaagaaaataatgatacttatgaaaagaatttagagacaaaaaatgatatgtgttattcattgaatagatcagatgatgagaaggaatatttaaaaatgaaattccctaatattattaataatcctattataaaactttatactgatccatattacacaatacatatgtcagataaaaaaatgaatacaacagattcaataaatacttcaatggatatgtctagttataattatactacaaattcttttatgaaagaaatgattaatatgtataaaccacatgagaaattaaatataggtattttatttacaggacaacaaactccaggtggtcataatattatatgtggagtttttgattgtttaaaaaaaaaaaataaaaaaaatactctttatggatttatgaacggatttcaaggaatgctcaaatataactttatggaattaaaaaatgaatatatcagtatgtttagaaatagtggaggatttgatatgattaaaagtagtgatatacaaattattaacgaagatcagaaaaaaaaatgttttaaaatatgtagacaactcaatttaaatggtcttgtcattattggagatgtttcaggtaataaaagtacagctatcttatctgaatattttgagactgtttataaaattacaaatgaaaagataaaaagtcaagaattaaaagaaaaaaataaagaagaaacaaaatgtaaacaagatggagaaaaaaatgaaaaagaagaacaacaaaatgaacaagatgacgaaaaaaataaagaacaacaaaaatgtaaacaagatgacgaaaaaaataaagaacaacaaaatgaacaacgggatgacgaacaaaataaagaacaacaaaaatgtaaacaagatgacgaacaaaataaagaacaacaaaatgaacaacgggatgacgaacaaattaatatggaggacaataacaatatatgtgaaatactcaaaaattatgtacaagaagataaaatatataaaccatataatataatagataataataaaacatgtgtatcaaatgaaaataagagcaataataatattccatatgataatatacaaagttataatatgtcttatgataatatatcaacttatgattttacttatgataatattagcgatataagtgatgaagaaattaataaaaaatatcccaaaaaaaataaaagttttgtaaaaacttcaattgttagtgcaccaacatgtgtttataatgaaatgaaaaataaatatattgaatgctctctagggtttgatacaactatatttagttattgtcaatatataagctatttaataacacatatacaaacatatcttcaaggatatcattttataaaagttatgggaaactcctctagtcatattgctttagaatgtttcttacaaacaaaagtaaatattatattagtcactgaagaaatcaaaaaaaataatttaacgcttgatcaaattatacaattcattgttgatgttattcaaaatagatacaaaaaatatcataaaaattatggtattgttattatacctgatgggatattgaaaaaaattacacaatttaaaaaattagtaacatctattattcatataaaaacaaaattcatagaaaataaaatcaatattttaacagatttacaaaatattttaagtaaacatttaataaaggaacaacaggaattttttaaaacacttcctgatttttttcaaatacaattactggaggaaatatgttcccaacaatttcac

SEQ ID NO: 265 - DNA, 1359 bp, Plasmodium falciparum
atgattaaaataatattagctagctttttatttttcttttatttttcgtcttccatttatgggaatgtggtggcccctaagagtgctgaggctgttcatacgttgacagcaaaacttgatacggaaaataaggctcatcaaaaatatatagatattataaatggagttttttcggaaaatatggagaattttgttttttcaataacaaccagtaacggatttacatgttcgataaataagttggatgttatttttgataataaagtaacaggaatgcaaaaagttttttctgatgagaatgttcaatatattaaagaagcttctcttgaatttaaaaacaatttgttggaatatatgaaaggtgttatgccatctgaaaatgatttttctaatgttagaaaagaatttcaaaaagtatgtgtaaaatatttttcagagttaagaagaaaatttttccagatatatagagaccccaataataagaatcaaaacgaagataatgttgataatcatatgaatattgaagaaataagccaagaattcttctctggttttaatccttttggaactatgaaaataagaaaagaacaaaatccagatttatcacaaaaggatagtttgatattaaatgaaaataataatgattctcttacatcagcagatcaaaagaataataatatggttcctatggaaaatagatcattttcatattctcaacaaagttcacatgttgtaagttttgatggtcacgatgaacatgttgaacaacaagagcaacattctggagataatacacaagaagacaaagatcaacttatggacttaccatttaacaaggataaagttttttcaaccttcttaaaaaatgtaactcttttaattgaaggaaattgtacagaagctcaacaacaagctcaagaacaaactcaagaacaaactgaagaacaagaagaagaacaaaatgaaaaagaaattgaaagtgataaacaagtacaaaaagatggagaacaaaaagaaaatgatgtacaaaaaaaacaaaaagctaatgctttcaccattcaattttcaagtagtcttagcagaaaacatatatctacaacatgtaatgcttcatcaggtaatgtcttcttaagaaaaggaaacaaaccatttgaacattttaatagtcctaatttcgaaaatatgatgaaaggagtttttggaattattcaaaatccttttgaaaatggccaacccactttcccattctttaaaaatattaattcgatctctggaatcggtaatgttgatatccccaaaaattttatgaatgattttttgaataatggaaatgatcaaaacacaccaatatcgagctaa

SEQ ID NO: 266 - DNA, 2976 bp, Plasmodium falciparum
aaatatataaaagatgaactaaataacaatgacaataacaataatctgttaaatatccaaaatgttgaaatcatggaatatgctgaaagcataaaaagtgataacataattaatgatactaaagaggatgctctacccagaaacgaaaccctcaattttctcaaacaagaatatgtatcaagtaaagaacaagaagaaaaaaaagacgaagaaaaaaatattttaaatgaacaagaattaaatgacataaacgaaaaaatgaaacaacaaaataacgttgattccaaattacctcattttgctattgaacaaagaaaaaaattaattaaagaaacaaaccgattttttaaaatgtataatttacatttaaaaattgaaaagttacctattaatattccgaatgatttaaaaatacttatgcagaaaaaaaagaaaattgtcgatattattaatgattacaaaattgtttttaaaacattacagaaatatgctgaaaaggaaaaaaatatttcggaagaacaagatggagaagaaagaaaactgtcacatgataatctagataaacaaaaagaacaacaaaatgatgaacatgataataataatgatagtaataataatgaaaataataataatgaaaataataataatgacaatattaataatgacaataacaataatgacaatattaataataatgatatatgtattgatcataaagtaacaaataatatggtgctaaatacagatggagatgaacaaaataaagaacaaaacatatcttcccaaacggataaaggaaatgtaattcttacgacaaaggatgaaacagttgttaataaaaatgacatatcatctgtattaaaagaagaaaatgaagacaaagaaaataaagaaaattccacacataaagatccggatttatctcttgatgtaaatgctgaaacaaaagaaaaggtacccagaagaagaggaaggaaaaaaaaattagaaaaagaaatagaagtacatgtaggaaaaagaagaggaagaaaaagacaaactgaagatatattaaatgataataacattaacgatgatagcttatattatttgagtgatagttctaaggaattaatagaaaaggaatttaataagtttatgaacatatttgaaaacattaacagaaataaaccaaacgaatcaaatgaatcaaatgaaccaaatgaatcaaatgaaccaaatgaaccaaatgaaccaaatgaaccaaatgaaccaaatgaaccaaatgaatcaaataaaccaaatgaatcaaatgtaccaaatgaatcaaatgtaccaaatgaatcaaatgaatcaaatgtaccaaatgaatcaaatgaatcaaatgtaccaaatgaaccaaatgtaccaaatgaaaacaacgaatccaatgagaaaaatatgaaaacattctctaatatgaatgatacttttaacgatcaacaaaaagatgaagttattgacgatgctactacatgcacttttatggatctaaataattgtacatatggagataacaagaataatacaagtgagtacaacaagaatgataaacaaacaaacaaagaacaataccgaccaattgattatgatgtagagaaggaaatacaaaattctgaaaaatcagaatattttgataaatatgaaaattcttttattcatcaacttataaacgatttaatacataataatttagaagaagaaaattatatacaattctcaaatatagataatgaagaaataaaatacagaaaattaaaagaggtaataacaaacctaaaaataaaagaaaaaaaaatagacttaattttaagtaataatttgagttttttcaaatattcctgtatgtatagaaagcgtcaattattacatgagaaaatgttaggaaattggagttatgtagaaaatacaattaataaaagagatgatattagaaataaaaatttgccttttcaattattaaaactagaacaaaatatgttagaaaatatttctaaatgttatgatgatatattattagaagatttctctggtattattataacgttaaatacaaattcttttgaaagagaaacagatggaaaaattattaaggtgtcaaaagttatatgtggatgtttaattgaatatctagataatacatcagaattaaacataaaatgtatatgggcacatccatttttaaatacaaaatctacttattacattttgtgtgcattcttaccaagggttattttagaagcatttttaaatagtaaaggaatattacataatgatataaatgataaagatcatataaatatggtcaattctgtaaagggggaagggttagaaaatatgaattctgaaatgtgtgaattcaaaaattccgaaaaaaaaaaaaaaaaaaaaaaaagtttttatgatagattaaatgaattagatatggaaaaaatcaagaacgatcatcatgaaaatgataatattaataattctcataacaatattatcaaattagaacaagcatatttctcaaactattctacatatgaatatcctttaacccatcttttaaattttaataaagagtgtgcatatgccttaaattataatgagaaccttttcaaagataatgaaaataagcaagacaatatcaacacatgtaataatatgaaaggtcataataattgtaacgataatacatcattatcttctaaagatagtaataacaaatttttgtatataatatttagtgatattgatatatttccaagacagtgctatttaattttatgttcatacaagtatatgtgtttaaatatgcactatgatacagataattattctgttcattatgatttagaaaatatgaaaaaggaaaacgtggggaaaacgacagagttatctaatagttgtccttgcaaatgtatgaaatctattcccgatgattctgaagaatcctatgagcgtataataggt

SEQ ID NO: 267 - DNA, 1869 bp, Plasmodium falciparum
atgagaaaattatactgcgtattattattgagcgcctttgagtttacatatatgataaactttggaagaggacagaattattgggaacatccatatcaaaatagtgatgtgtatcgtccaatcaacgaacatagggaacatccaaaagaatacgaatatccattacaccaggaacatacataccaacaagaagattcaggagaagacgaaaatacattacaacacgcatatccaatagaccacgaaggtgccgaacccgcaccacaagaacaaaatttattttcaagcattgaaatagtagaaagaagtaattatatgggtaatccatggacggaatatatggcaaaatatgatattgaagaagttcatggttcaggtataagagtagatttaggagaagatgctgaagtagctggaactcaatatagacttccatcagggaaatgtccagtatttggtaaaggtataattattgagaattcaaatactacttttttaacaccggtagctacgggaaatcaatatttaaaagatggaggttttgcttttcctccaacagaacctcttatgtcaccaatgacattagatgaaatgagacatttttataaagataataaatatgtaaaaaatttagatgaattgactttatgttcaagacatgcaggaaatatgattccagataatgataaaaattcaaattataaatatccagctgtttatgatgacaaagataaaaagtgtcatatattatatattgcagctcaagaaaataatggtcctagatattgtaataaagacgaaagtaaaagaaacagcatgttttgttttagaccagcaaaagatatatcatttcaaaactatacatatttaagtaagaatgtagttgataactgggaaaaagtttgccctagaaagaatttacagaatgcaaaattcggattatgggtcgatggaaattgtgaagatataccacatgtaaatgaatttccagcaattgatctttttgaatgtaataaattagtttttgaattgagtgcttcggatcaacctaaacaatatgaacaacatttaacagattatgaaaaaattaaagaaggtttcaaaaataagaacgctagtatgatcaaaagtgcttttcttcccactggtgcttttaaagcagatagatataaaagtcatggtaagggttataattggggaaattataacacagaaacacaaaaatgtgaaatttttaatgtcaaaccaacatgtttaattaacaattcatcatacattgctactactgctttgtcccatcccatcgaagttgaaaacaattttccatgttcattatataaagatgaaataatgaaagaaatcgaaagagaatcaaaacgaattaaattaaatgataatgatgatgaagggaataaaaaaattatagctccaagaatttttatttcagatgataaagacagtttaaaatgcccatgtgaccctgaaatggtaagtaatagtacatgtcgtttctttgtatgtaaatgtgtagaaagaagggcagaagtaacatcaaataatgaagttgtagttaaagaagaatataaagatgaatatgcagatattcctgaacataaaccaacttatgataaaatgaaaattataattgcatcatcagctgctgtcgctgtattagcaactattttaatggtttatctttataaaagaaaaggaaatgctgaaaaatatgataaaatggatgaaccacaagattatgggaaatcaaattcaagaaatgatgaaatgttagatcctgaggcatctttttggggggaagaaaaaagagcatcacatacaacaccagttctgatggaaaaaccatactattaa

SEQ ID NO: 268 - DNA, 1992 bp, Plasmodium falciparum
atggcatcactcaataaaaagaacattgtaaaaatcctcgaaagatgtgtaaagaatactttattaagtgaaaagagtcgctctttgtgtacaagtaagataaatcgcaatagagcttccggagatatcataggtattgatttaggtacgactaatagttgtgtagctataatggaaggtaaacaaggaaaggttattgaaaattcagaaggatttagaaccaccccatctgttgttgcctttacaaatgataatcaaaggttagttggtatagttgcaaaaaggcaagctataacaaatcctgagaatacagtatatgcaacaaagagatttataggtagaaaatatgatgaagatgctactaaaaaagagcaaaaaaatctaccatataaaattgttagagcatcaaatggagatgcttggattgaagcacagggaaagaaatattccccaagtcaaataggtgcatgtgttttagaaaaaatgaaagaaacagctgaaaattatttaggaagaaaagttcatcaagctgtaattacagtaccagcttattttaatgattcacaaagacaagccacaaaagatgctggtaaaattgcaggattagatgttttaagaattattaatgaaccaactgctgccgctttagcatttggattagaaaagagtgatggtaaagttattgctgtatatgatttaggtggtggtacatttgatatttctattttagaaattttaagtggtgtttttgaagtgaaggctacgaacggtaatacatctttaggaggagaagactttgatcaaagaatattagaatatttcatttctgaatttaagaaaaaagaaaatattgatttaaaaaatgacaagttagctttacaaagattaagagaagcagctgaaacagccaaaattgaattatctagtaaaacgcaaacagaaattaacttacctttcattacagctaaccaaacaggtccaaaacatttacaaataaaattaacaagagctaaattagaagaattatgccacgatttattaaaaggaactattgaaccatgtgaaaaatgtatcaaagatgcagacgttaaaaaagaagaaatcaatgaaattatattagttggtggtatgactagaatgccaaaagtaacagacactgttaaacaaattttccaaaataatccatcaaaaggtgtgaatcctgacgaagctgtcgctttaggtgctgctatacaaggaggtgtattaaaaggtgaaattaaagatttacttttattagatgttattccattatctttaggtatagaaaccttaggtggtgttttcacaaaattgattaatagaaacacaactattccaaccaaaaagtctcaaatattttctacagctgctgataatcaaacacaagttagtattaaagtattccaaggagaaagagaaatggctagtgataacaaattattaggttcttttgatttagttggaattccaccagcaccaagaggtgtaccacaaattgaagttacctttgatgttgatgccaatgctattattaacatatcagctattgataaaatgactaacaaaaaacaacaaattactatacaaagtagtggtggtttaagcaaggaagaaattgaaaaaatggttcaagaagctgaattaaacagagaaaaagatcaactcaagaaaaatttaactgattctaaaaatgaagctgaaacacttatttatagttctgaaaaacaattggaagatttcaaagataaaatttccgattctgataaagatgaattaagacaaaaaattacagtattaagagaaaagttgacatctgaagatttagattctattaaagatgccactaagcagttacaagaaaaatcatgggccatatcgcaagaaatgtacaaaaataatgctcaacaaggagcccaacaagaacaaccaaataatgaaaataaagctgaagaaaataaagataatgcataa

SEQ ID NO: 269 - DNA, 1563 bp, Plasmodium falciparum
gataataacgattataagaacgaatcaaagaaaaaactcaaatccattttcataaatgaaaaagaaaaattatttaggagtgtcgataattatttcaaagaattatataatgataattatatgtttttagaaaattgtaaaagtttttcaaatacttcatcagctattttatttttctttaaaacaggaaatatctcctcagaaaatttacattatcaacaaaaaagtggttgggtaatagcagcagatgaaattaataatttaagattaataaccaattttagagctatacacagaggaaccttttttcaagatgttaaagtattaactcccagaaaattattaggagaatcatggggtttcatatgccctgtacatactcctgacggtaccccttgtggtttattaaatcatttggctcaatattgtcatattcataatttatctagtaatgaagcacataaactcaatataaaattgtatcttaaaaaaataggtataaatgtaaatttagatgatactagtggtatacatacaatatatgatgatgaaaacattccaattattgttgattcaatacccattacatatataggtgaaaaagattttaatagaacagtgtataaattgaaatatgcaaaaaacaataatttgtttaatttaaaatcatattttgaaataaatgcttatttaaatgaaccgttaattatgaacagtataataattaatacatttccaggaagacttatacgacctttattgaatttgaaaacgaaagatattgaatttatttcaccatcctatcaaccatatatatctgtagctataaacaacgaagatgtaaaaaaaaataatttagctagaaaacttttaaaaaaaaaagaacaagttgttaattcgatgaaaatagatagaacccctggaagtataaagcagaaatttttatatcatcaaaatagggaaaacttattatggaaattaaaaaaggaatcaaaagatggctcatataaatatgaaaaacataaaattgatagaaaattattaaaaattttagatcagaaaaaaaataacgattcagatacaaatacagataattatgttagtagttctgaatatgatacagattcggattatgattatggttatgattctaattctgatggtgattcaaaatctaactctaattttgattcaaaatctgataatatatcaggaagtgataataatatgtcaacaactacatatattgatagtgatgaaaatattaatattgatatgtatgaacaaataccacaaaaatttgaatatatggaactaaaagagacatcgtttttatcctttcttgcttctttgactcctttttcagatcataatcaaagtccgcgtaatatttatcagtgccaaatgttgaaacaaactatgggaatacaaagtttaaataatgtatatacattcacaaataaaatatatcgaatgataactcctcagtttccattagttgtaacaagagattatgaattttatggagtagataattttcctagtggtacgaatgccgtagtg

SEQ ID NO: 270 - DNA, 1557 bp, Plasmodium falciparum
gattatgaattttatggagtagataattttcctagtggtacgaatgccgtagtggctatattagcttatacaggatacgatatggaagatgcattaataataaataaagctagtgcagatagaggtatatttcgaacacatatatataaaactgaatttattgatttacaaaaagttggagaatctagtaattttgtgtttggaaataatataagatatttaaataataataaaaataataataagaatttggcttacgaaaataaaggaaaatttttaaataaagatggtttaccttgtgtacaacaaaaaataacagagggtagtccattatattcatatattaataaaggtaatgaattaactacttatgaatcttttaggaaccatggagaatatttcgtagactttgtaagtataggaaaaaataattcaaatcaagtagcagttgttaaattaagatcaacaagacaaccacaagttggtgataaatttgcatctagacatggacaaaagggggttgtttctcgattatttcctcaagaagatatgccatttgctgaaagtggaatcgttcctgatattattttcaatcctcatggtattccatctcgtatgactataggtatgcttatcgagagtatttgtggaaaggctgcatctttatatggaaaaagaatagatgctactccatttagaaaatatacgcaacaaaaaagttttaacaatccatggattgacaattgtggtatcaaaggtttcttggaaaaaaatgatacaataaaatctgacttggatacatgtcagaaggaaaaagataaaaataaaaatattaataataataataataataaaataaaagaaaataaatataataactcaaatgatagtaatgcatctattgatagtgatgataatactaacaattgtaatgataaacgtgatgaagaagaaaaaaaagctaatataacttatgatgaaaaaattgattatttcgctaaattgttattaaacaaaggatatgattattatggcactgaattgttatatagtggtatatatggggttccattacaggcacatatatttattggtgtaatttattatcaaaggttaaggcacatggcttatgataaagctcaagtcagaagaacaggaccagtgtgtaacttaactcaccaacccttgaaaggaaaaagaaaacatggtggtataagagttggagaaatggaaagagacggtataatatcacatggttgtagttttgtaatcaatgaaagatttttaatgagttctgatggacatgaatgttttgtttgtcctaaatgtggacttattttatcaccaattatgcaatttaatacaactggaaaaataatgaaaggaagatctattggtggaaaaagtaaaatggctgtatgcaaatcttgtgatgtttcttgtaaaattatttttattccgtatgttatacgatatttattaaatgaactcatttgtttaaatgttaccataaggttgaatatgaaatcagtggaaaatgtttttgacatgaagtaa

SEQ ID NO: 271 - DNA, 330 bp, Plasmodium falciparum
ggacgagggaaaaaagttaccttaatacatattattgattttggtttagcaaaaaaatatagagattcaagatcacatactcatattccatataaagaagggaaaaatttaacaggaacagcaagatatgcaagtataaatacacacttaggaattgaacaatctcgtagggatgatattgaagcccttggatatgttctcatgtattttctaagaggaagtttaccatggcaaggtctaaaggctatatctaagaaggataaatatgataaaattatggaaaaaaaaatatcaacatcagtggaagttttgtgtagaaatgcaagcttc

SEQ ID NO: 272 - DNA, 1287 bp, Plasmodium falciparum
agtgtggcctccattagcagaaattttgaaatttctccgttctcaaattatggacacaagagtgtgcacattttagccccaggtcatcacatatattctactattccaaataactcatacaagatctttacaggtacttctatggctgctcctcatgtatgtggtgtgagtgctttggtatattccgtttgttataaccaaggttttattcctcaagcggaagaggtgttagatatattaacaaggacatctataaaaataatttctacaaagaaaagaaccataaatgacagtttagttaatgcagaaggagcagttttgactactttattaggaggactatggatgcaaatggattgttattttgttaaatttaatttagaaaaaggcaagaaaaagcatattcctgttgttttctcggcttacaagaaaggagtatatgaaacagatatcgttatagctattatacctattgatgggaaatccaaaatatatggagaaattcatattcctataaaaattgtaaccgatgtaaatattcccaatttccaagaatctccacgaagaggaaaaaattatactatagattctaatgaagcacaacatgatgaagtcctttcttatatctgtgaaaatgccttatataatttgtatgaatatgatagtcattatttgttggcttctgtcatattattttttctagcattattatccatatttgttggaatgatatatatgaagtcgcgtaaacatagtgataagaaatgttctaaaaatcttatcaaaagtaattatataccagaaatggatgatggtatggaagaaacacaacaactgcaacaagaaagaagacaatatttcagagaattatttggagaaaatttggaaaagaattacgatcagcattttgtacaagattttggtcaagattttagacaagatttcaagctgggttcaacaccagacttaaaacaatattctgatatagatttacaaaataagatacagcaaccggaaaggaaaaccgtaaagataattattaataactttgaagatagaaagaaagagaccaaaagaagactactcaagggattaaattatgatggagaaaatgcaaagaaacatgatttcacgaatgaaagtattagcaatagtaggaaaaattttaaattctcaaacaatacagaaatgaaaaaaaatactataaaaagtgaggacgtcaaaatagcatctgacgataatgttaataaagcaatgaatcaacttgatgatatgtttatgaaatga

SEQ ID NO: 273 - DNA, 2814 bp, Plasmodium falciparum
ggtattcacagtggcatgactttgtacaatattcacaggtgtatttgtatatgcttaggagtaaaaaaagaagataccgacaattatttacatgtatttattctaaataatggaaatatatacgggagtgggaaaaaatgtagtgttagtattataagaaaaatacaaataaataccgatcgacacattacattcaagcatataatcaagacacctttgtatctatataaatcaaaagaagataaaaacaaaaacaatagtaataataataataataataataatagtaataataataataatagtaataataataataatagtaatagtaatagtaatagtaataataatactaatagtaatagcaatagtaatagtaatagtaataataataccaatagcaataataatagtaatagtaatagcaataataataatagtaataataatactactactaataatagtagtagtagtaataatagtaataataataattattatcataataattataaaaatgaaaaagaattgaataattcttcctctcttgagcattccagtattattatgaataatgataatatacataataatataaataacaaccatattaataatattacagatttaaataatatgaacgtaaatcaaagcaacatgaaagaaaataataatataattgattatatgaacaataataataataatgataattacagtaataaccatttgaataattgcataaacaaattatatacaaataatatttattttactgaggattctcaaaaaaggaaccctctacaaacatataatacttcaaaaaatacgaataactttttgaatgtaaataattttacaagttcatataatttccctaatataaataatatggacagtaatatatataaccatacaacatgtaataattttaacaaaaatataaataataacattaatgatatatccattaataaacataacaatatatttaataatatgaatcatttaaatcatttagataaccattcttatattcaaaataatttatataaaaatcatatgaatgtaaatacaaacattctatataataatcctatcatgaataatattaacaatgatcaaataaataatttatctataccaaataataaaaatgaggataataatgaaatcaatcatgatgatagtaatgatgatgacagtaatagtagtcatataacattaaataaaagcgataaaaataaaaactattttgcgttaaatccaaaatatcaaaatcatcaaaatcataatataaacaataatatccaaaataatctaaacgaacaaataaaagaaaaaaatgatcaacaaaatcataatattaaagaaattaaaaataaagaattattaaatgataccatttcttctattgaagacactaatgataattcatattccaagtatattacttcttctgatatatcacaaaataatacacttaattcttttcaacataataaggagatttccgtaaattttatgtacaacaatataatacttgataacaataataacatcaatgatgacaataataataataataattatttttgtattccatgtggatacaatacaaaagaatataaatataatatatataatacatacaattatccaaataatgctaaccatatatacaataatatgaacatttcatataataacagtgcctacaacaataattatgttacatataataattttcataattcttaccataataattacattctacataataattttcataatccttacaatatatatgataacattcaaaatacagaacaaaaaaaattatataatatatatcaaaatgatgaaagacaaaacaattcatttaatcatattaatacagatcctcataaagttgtaaattcaaataattttctgcctattaatacatttcattataacaacaacttaaatcataacatattaacagaatcaaataatttaaatagaaaaaatgaaaatgataatattccttctagttattcacaaattcataatcatcaaatatgtaaaaaagtagaggaatatacctacaattctataaaccaaaacaccaataattttaataataatgtcatgatgttaatgaatacatcaaataacatccccctggataataatacttataattctaataaaaacaaaataatatataaacatattatcaatgatcatatcaatcaaaaggataataatgtggaatatgaaaatttaaataattcttgtgataatacacaaaataaggaaaccttttgtaatcaagatcttataaatagttctaatataaataataatataagttcctacacatttcaaaataataatgatttctatacaaaaaaaaaaagtatgcaatataatcatgataacatttacaaaataaatactacttcagaaaatgtaggaagcccacacaccaacaataaaacaagcatatataaccacaaaaaagggggatacgaacagcacacagagcagaacaatgaacagaacaatgaacagaacagtgaacagaacatcgaacagaacatcgaacagaatattgaacaaaatgttgcacaaaatgttgcacaaaatgttgcacaaaatgtcgaacaaaatgtcgaacaaaatgttgcacaaaatgtcgaacaaaatgttgaacaaaatgtcgaacaaaaggccgaacaaaatagtaataatgaatcaataaaaaccaatactgtagaaacatttaaaagaaataaaaaccagattaccaactcaaataat

SEQ ID NO: 274 - DNA, 2802 bp, Plasmodium falciparum
gttactgaagaaatagtagaggaagaaggctctcctaatgaagaaattgtagaaggagtatcagttattgaagaagatgataatatagaaccagttagtgaagaaatagtagagggatcggttactgaagaaatgataaaagaaggtttagaaaatgaagtaatattagatgaagattcaattactgaagaggctttagagaaagaaggatcagttagtgaagaaatagtagaggaaatgggatcacttactgaggaaatagtagacgaagaaagatcaacttccgaagatatgatagaagaaggatcagcttctgaagaaataatacaagaagaatcgcaagttgaagaagttgtagaagaagtatcagttatcgatgaaatagtagaggaagacgaattagatactaaagaagttgtagaagaaatagaatttaatactgaagaggttgtagaacataaagaagaagaaggatctgtcgctgaagaaatagtacaggaagaaaaggaaggatctgttaatgaagaaattatagaagaagtaggctcaattactgaagaaatggtagaacaagatgtatctgataatgaagaaatagtagaagaaagatccgttattgaagaagctgaagaaaatgtatggattgagaaagaagtagaagaagaaggattagataatgaagaagtcatagatgaagaagattcagttagtgaacaagctgaggaagaggtatatattaatgaagaaatattaaaagaatcatcagatgttgaagatgttaaagtagaaaacgaattaatgaatgaagaagttaacgaagaaacacaatcggttgctgagaacaatgaagaggataaagaattagataattatgtagttgaagagactgaatcagttactgaagaagttgtagtagacgaagtaccaaactctaaggaagttcaagaaatagaatcaattatagaagaaatagtagaagacggattaactactgatgatttagtaggacaacaaggatctgttattgaagaagttgtagaagaagttggatcagattctgaagaaatagtagaggaagcatcaattactgaagaagtcgaaaaaaaagaatcagttacagaggatattttagtagaagaatcagttactggggatattttagtagaaggatccgtaactgaagaagttgtaggagaagaaaaattagttagtgaagaaatagtaacggaagaaggatctgttgctcaagaaatagtagaagaagatgcaccagctactgaagaaattgatgaaatagaatcagttactgaagaagttgtcgaagaagaaggacctgttgatgaagaaattgtacaagaagaaggatcagttactgaagaaataatacaaggagaatctaaagttgaagaggtcgtagaagaacaaggatctgaaaatgaagaaatattcgtagaagaagtatcagcttctcaagaaatagtacaaaatgaatcaggtaccgaagaaatattggaaaaagtatcagcttctcaagaaatagtacaagatggatcagttactgaacaaataatagaggaacaaaaaccagttactgaagaggttgtaaatgaagaagaatcaattactcatgaaataatacaggaagaatctcatgttgaaaaagttgtacaacaaggatcagttgctgaagaagttgtagaaaatccagtatctgttactgaagaaatagtagaaaaagaaggatccgttactgaagatataggacaagaaggttatgttgcggaggaaattgtagaagaagaagaatttgataatgaagaaattttagaagaagaatctgttgctgaagaatttgtagaagaaggatttgataatgaagaaatattcgtagaacaaatatcagattctgaaatagtaaaagaagaaaattcagttaatgaagaagtcttagaagaagaaggatcatatactgaagaaatattagaagaagaaggatcatatactgaagaaatattagaagaagaaggatcatttactgaagaaatattagaggaagaaggatcatataatgaagaaatattagaggaagaaggatcatataatgaagaaatattagaggaagaaggatcatataatgaagaaatattagaggaagaaggatcatataatgaagaaatattagaggaagaaggatcagctactgattattttgtaggacaaggatctgataatgaagaaataatagaagaaggatcagctactgattattttgtaggacaaggatctgataatgaagaaataatagaagaaggatcagctactgattattttgtaggacaaggatctattattgaagaagttctagaagaagaaggattagatactgaaaaagtttttgaaaatgaaggatcggctactgaatttgaggaaacagaatcgtttactgaggtagttgaagagacagaatcagttaatgaaaatatcttagaagaaacatcaattaacgaagttcagaaaatcgaatcaattactgaagatattaaagaacaattagttcctgaagaaattaaagaagaacaattagattctgaagaaattaaagaagaacaattagattctgaagaaattaaagaagaacaattagttcctgaagaaattaaagaagaacaattagattctgaagaaattaaagaagaacaattagattctgaagaaattaaagaagaacaattagattctgaagaaattaaagaagaacaattagattctgaagaaattaaagaagaacaattagttcctgaa

SEQ ID NO: 275 - DNA, 1569 bp, Plasmodium falciparum
ggaaattttggatataatggaagttcaaattctggtgcacaatttactgacaggtgctcaagaaatttatactgtgaaacattgccaatcaacccatatgctgattctgaaaacccaatagttgtaagtcaggtatttggtttaccttccgaaaaacctacgtttacgttagaaggtactcctgatattgatcatacaaatattttgggttttaatgagaagttgatgactgatgtaaatagatatcgatattctaataactatgaagccattccccatacaagggagttcaatccacttattgtagataaagttcttttcgactataacgaaaaggttgataacttaggaaggagtggaggagacattataaaaaaaatgcaaactttatgggatgaaataatggatattaataaaagaaaatatgattttttaaaaacaaaattacagaaaacttacagtcagtacaaggttcaatatgatatgccaaaagaagtatacgagagcaaatggggacaatgcttaaagcttattaatcaaggaggtgataaccttgaagaaagattgaacacacaatttaaaaactggtacagacagaaatatttaaatcttgaagaatatagaagattgactgtgttgaaccaaatcgcttggaaagctttatccaaccaaattcaatatacatgcagaaaaattatgaatagtaacatttcttcttttaaacatataagtgaattgaaaagtttagaacagagagcggcaaaagatgcacaagaagaaatgaggaaaagagctgaaaaacagaagaagaaaaaaagtaaaagaagaggatggttatgttgtggtgggggagataacgaaacagttgaaccacaacaagaagaaccagtccaagacgttggagaacatcaaataaatgaatatggtgatatattaccatctttaaaagttagtattaataattcagcaattaattattatgatgcagtaaaggatggtaaatatttggacgatgattcatcagatgctctttatacagatgaagatttgttgtttgatttggaaaagcagaaatatatggatatgttagatggatctgaagacgaatctgttgaagacaatgaagaagaacactctggtgaagcaaatgaggaagaactaagtgttgatgaaaatgtagaagaacaaaatgttgatgaaagtggagaacaacaaagtgatgatgaaagtggagaacatcaaagtgttaatgaaattgtagaagaacaaagtgttaatgaaattgtagaagaacaaaccgttgatgaaattgtagaacaagaaaccgttgatgaaaatgtagaagaacaagctgtcgatgaaaatgaagaacaacaaaccgttgatgaaaatgtagaacaacaaactatagatgaaagtcaagtacaagaagaaatatctactattcaagaaaatatagaagaggtagttagtgaagttcaacaagattcagaggtagatagaactcttcatgttcctgatacaagattctatgatatattaggtgttggagttaatgcagatatgaag

SEQ ID NO: 276 - DNA, 798 bp, Plasmodium falciparum
tataattttacatatagtggaaattcaacttgtagattacaatttactcatagatgctcaagaaatttatatgggaaagaattatcaataaagccatacttgaactctcgatatccaatagttataagtcaagtctacggtttaccctccgaaaaacctacttttaacttagaatgtatccctgatattcattatacaaatattgtgggatttaatgaaaaattgatgaatgatgcaaatagatatacacttttaaataactatgaagtaattcctcatgtaaaagaattcaaaccacttatcgtagatgatgaactacttgaatacaaccaaaaggttcataacataggaagaaatggagaagacattttaactgctatgcaaacattatggaatgaaataatggatattaataaaaaaaaatatactgtgttaaaagcaaaattacgcaaaaaataccataaatacaagattcaatgtgatatgccagaaaaagcttacgtttataaatggagacaatgcttaaatattattaggaaaggaggacataatcttgaacaaagattgaacaaacaatttgatacttggtacaaacaaaacgcattatatcttgaagaatatagaaggttgactgtcctgaatcaaatagtttggaaagcactatcaaaccaaattgaatattcctgtagaaaaatcatgaccagtgatattacttcatttatacgtataaatgaattagaaattatggaacagagagcagaaaaagctgctcaagaagaaatggagaaaagggaacat

SEQ ID NO: 277 - DNA, 2985 bp, Plasmodium falciparum
atggggaatacacaatcatcagaggaagaggaagctaaaagccctagtttaacagaaagtcacaacagtgcaaggggtgttttggaagaaattggaaaaaagataaaagataagacagaaaaagagagtaaacatgtaaggcaattgaaaggaaaattatcaaatgcaaaatttgctgatcgattgtataaggaatctggtggtgatttaaggtctgcttattcagatgcttgttcacttacatacaaatttcatactaatataacaactgatgggggggatggaaggcatccttgtcatggtagggaaaacaatcgtttttctgaaagtcaagaatatggatgtagtaatgtatacataaaaggaaatgaaaataacagtaatggtacagcatgtgtaccaccaagaagaagacatatatgtgatcaaaatttagaatttttagataatcctcacactgatgatactgatgatttgttgggaaatgtgttagttacagcaaaatacgaaggtaattatattgttagtaatcatccagataaaaacagcaatggaaataaatcaggaatatgtacttctcttgcacgcagttttgcagatataggagatattgtaagaggaagagatatgtttaaatctaatgaaaaggtagaaatcggtctaaaaaaggttttcgagaaaataaataatggattgaagaaaataggaattaatgattataatgatatatctggaaattattataaattaagggaagcttggtggacggctaaccgcgatcaagtatggaaagccataacatgtagagccccaaacggggctaattattttagaaaaggtttagatggaaaaataattttttcagataatggaccatgtggtcgtaaggaactaatcgttcctacctatttagattatgtccctcaatttttaagatggttaaatgaatggtcggaagagttttgtcgaataaaaaatataaaaataggaaatattaagaaatcctgtactggagaaagtaataataaacattgtagtcgtgagggttacgattgtaataaaacaaatctaagacttaatgaaatttttatggatctagaatgtccacgttgtgcagatgattgtaaatcgtatgaaacatgggtagaaaaaaaaaaaaaagaatttaataaacaaaagaaaaaatacgaaaaagaagttgatgctacacaaaataatgataataacgaaaatggaatctataataaaaaattttatgatgaactaaaaagttcatataaagaagttaatagtttttttgaattattgaataaaggaccaatatgtgaacatattgataaaaaaattccaatggactataataatactgagaaaacattttcccgttcagagtattgtaaatcatgtcctataacagatattttatgtgatgataatgaatgtaaaaccattaatgaatttaaatgtagagaaataaaaagtatgcctaatataagaaaaaacgaaaatgaaacccctattgatattgatattctggttaatgttaataacaaaaaggttattacgcatgatttaaagaataattacgaaaactgtgatctttttaaaaaactaggagaacaaaaatggaaatgtaaatataaatgttacttagatgtatgtgaaccgagaaatttggatagtaatatatataatgaacgatatatctcaattaaagtactatttaaacggtggttagaatatttcttagaagattacaataaattaaaggaaaaattgaacccatgcatgtataatgtacaagaaatcgtatgtataaatgaatgtaagcaaaattgtgaatgcgtagaaaaatggataaaagaaaaaagggaagaatggaaaaaaataaaagatcgttacgtacaacaatatgaaagtaaagatgaagatgtttcttctaaacttaaaaaatttttgaaacaggaactgtttactaattatgttaaaaatgccttggacaaggatgaaacgttagatagtatgaaagaatctactgaatgcattgatcctaataaacccaaaggaaaaccatgtaacaataacgatgtcataaatattttacttaatagacttgaaaaacaaatcgataattgcaaaaagaagcacgaagaaaagggagaaaaaccttgtgttgatatacctaaacttctaaatgatgaagatgaggacgaagatgacgacgaaacaccacgcgcccataatccgtgtgtagataaaaatgattctcaacccactaaaactgtgagttatatcgctagacaaatgcatcgaagggcaaaagcacaaatgacaaaaaatagtgttgttgatggtgataataagttggaaggcgatatatttaaggttacatttagaaatggcggggtcggaaaaaacctgaatggagatatttgcaagattgacaaaacgtattccaatgacagtcgtggtactcctacagatggaccttgtgaaggcaaaggcgatcggtttaaaataggaacggactggcaaggtgatagtttcgtaaacccacaataccgtgggatttatatgcctcctagacgtcaacatttttgtacatcgaatttagaaaaattagatgttagtagagtcataagaaatggtaatgctagcaattcattattgggtgatgtgctgctcgcagcaaagtatgaagcagaacgaacaaagaaccattatgtatctaaaaaggaagaacattccgaagcttgtcgtgctgtgcgttacagttttgccgatttaggagatattatacgaggaaaagacatgtgggataaaaatcatggcgagaagaaaacacaagaaaatttagaaagaatatttgctaaaattaaagagcaacttcttaatagcagtatcaaagataaatataaggatgatgacaaagcaacacccaaatataaacaattaagagaagattggtgggaagccaatcgttca

SEQ ID NO: 278 - DNA, 2985 bp, Plasmodium falciparum
gcaacacccaaatataaacaattaagagaagattggtgggaagccaatcgttcacaggtatgggaagcaatgcaatgcccaccaaaaaacggtactttcccatgtaaaagtgatcatacaccgctacatgactacatcccccaaagattaagatggatgaccgaatgggcagaatggtactgtaaagaacagtcacggctgtatggagagttggtggagacgtgtggtaagtgtatgcataagggaaaatgtaagcaaggtaatggccattgtgtaacgtgcaagccagcatgtgaaaaatataaaaaatttattaatacatggcaacctcaatggaaacaaatggaacaaaaatactcccagttatacgaagaagcaaaaaagtataatgatagtagcagaaaagataccacaaacaaagacgattatgtccttcaattcttgaacaaattactcacgcaaaacaaaggaaataaaacatatgatactgctgaaggatatgtacaccaagaagcacatattagtgattgtcagaaacaaacacaattttgtaaaaaaagaaatggtgagatcccaagtagtgatacagagaccgacaacaattatgcctttcgtcctcaaccacacgaccatgatgaggtgtgtgagtgtaatactagacagaagacgaaggtacggaaaaaaaaaaaaaaagttgatgcatgtgaaatggcaaaaacacttttgcacaacaacgatggaaccataagaataggacaatgcaaacgtaaagatgaaggaaatgcagaatatccaaaatgggattgtaattctcagattcatacaacacataatggagcatgtatgcctcctagaagacaaaaattatgcgtatatttttttgcaaatccatctcaaataggaagtataaataaacaagataatttaagaaaagcatttattatatctgcagcagcagaaacatttcgttcatggcagtattataagagtaagaatggtggtgaaaacctccaaactcaattaaaagatggaactattcctgacgattttaaacgtcaaatgttctatacatatggagattatagagattttttatttggaaccgatatatcaaaaggtcttggtgaagggactgccctagaaaagcaaataaatattcttttcccaaatggtgtccgaaaaattcctaatgaaaaaacacgtgaaaagtggtggacagatcacggacctgagatatggaaaggtatgttatgcgccctaacaaatggtctcagtgaaagcgaaaaaaaaacaaaaatattcgacgactactcacacgacaaagtcaaccaatccaaaaatggtaacccttccctcgaggatttcgcaaaaaaacctcaatttttcagatggtttattgaatggagtgatgaattttgtcgggaaaggaagaagaaggaagaggaggtggaaagggattgtaaggatgaatatgagggatgtgaaaaggagaaaaatggtaaatgtgttaccgcatgtaaagcatataaagaatacattacaaacaaaaaagaagaatatgatagtcaaaaagggaaatttgacgttgaaaaaacagagaagaaacaaggatatgaagattattctgagaaacaggcttctgaatatttgaaagaaaaatgtataaaatcatcatgtaattgtatgaagaaagttacagaaatttccaattactggaccaaccctcataaaacctacgacaccgaaaatcttggaatcaaatgtgaatgccccccttcaccctgcaccatcgtggatggcatcctcagcccacaaaattcgagttcgtacgccgaagggtgtaaatggaaatatgggaagatgtcacaagggggtacggaatgggattgtagtaaaaaaagtgggggtgaaggtggtaatgaggacggtgatgttgtatgtatacctccaaggagaaggagattatatgtaaagaatttacaggatttgactggtgaagaatcactagtggatttacgaaaagcttttattaagtgtgctgctatagaaacattttttgcttggcatgaatttaaaaaagaaaaagaaagagaggaaaaagaaaaaaatgaacaagatgtacaatataaatcatctgtcttagaaaatcttcaaaagcagttaaaaaatggagaaatagatgatgagtttaaaagacaaatgttctatacatttgcagattatagagatatatgtttagggaaggatataggtaacgacgtggatggaattaatgaaaaaatagatacaattttgcaaaaaaatggaaaacctaataatatcgaagaatataaaaaatggtggcaaaaacatggtcatgagatatgggaaggaatgttatgtgctctaagctacaataccgaaacaaaagagatggataaagaacttcgcaacaaattaaccgaacaaaagaacggtaacaaaaacacgtacgacaccgtcacaattagtggtggtcccattggtaataccaaattggagaaatttgcatctaggcccccattttttcgttggttagaagaatgggcagatgagttttgtagaaaacgaacacataaattggaaaaaattcaaaatgaatgtaagggagtaagtggtacaaatcagtgtgatgatgatggttttgactgcgatgaaatgtgtccaaaaaaggatgggagttttgaaacgtttaaatgtctgagttgtgccaaatcttgtagattttataaaaagtggataagtagaaaaaaagaggaatttgataaacaaagcaaaaaatacgaaaacgaaattgacgatgttaaacataattctgataacatatatggaaaagactttcttgaaactcttgatcaacaatataagtctgttgaattatttttagaaaaagtaaaaggaccatgttctattaataataataatgaagaatgtaaaatagattttaataaaccaaaggatacattt

SEQ ID NO: 279 - DNA, 1197 bp, Plasmodium falciparum
aaaaaaccgaaatcacctgttgacctcatacgtgtaattgatatccataaaggcgattatggaatacctacattggaatccaaaaatagatatatcccctatgtgagtgatacatacaaaggcaaaacatatatatatatggaaggagatactagtggagatgaaaaatatggatttatgtctgatactactgatataacttcctccgaaagtgagtatgaagaattggatattaatgatatatatgtaccaggtagtcctaaatataaaacattgatagaagtagtattggaaccatcaaaaagtaatggtaacacactaggtgatgatatggtacctaccacgaatacatttacagatgaggaatggaatgaattgaaacacgattttatatcacaatatatacaaagtgaaccactgaatgtaccacaatatgatgtattaaaggagttaccaatgaatatagtaggtaatgttttagatgatggtataaacgaaaaaccttttattacttctattcatgatagggatttaaatagtggagaagaaattagttataatattaatatgagtactaatagtatggatgatccaaaatatgtatcaaataatgtatattctggtatagatttaattaatgattcactaagtggtggtaaacctattgatatatatgatgaagtgctaaaaagaaaagaaaatgaattatttggaacaaattataagaaaaatacatcaaataacaatgtagctaaattaacaaatagtgatccaattatgaaccaattagatttgttacataaatggttagatagacatagagatatgtgtgagatgtggaataataaagaggaagtattagataaattaaaagaacaatggaataaagataatgatggtggtgatatatcaagtgatagtaacaaaaggttgaatacggatgtttcgattgaaatagatatggatgatcctaaaggaaagaaggaatttagtaatatggatactatcttggataatatagaagatgatatatattatgatgtaaatgatgaaaacccatctgtgaatgatatacctatggatcataataaagtagatgtacctaagaaagtacatgttgaaatgaaaatccttaataatacatccactggatccttggaacaacaatttcctatatcggatgtatggaatatataa

SEQ ID NO: 280 - DNA, 690 bp, Plasmodium falciparum
atgaaggtctctaaattagtcttgtttgcgcacatattttttattataaatatcttatgtcaatatatttgtttaaatgcttctaaagtaaataaaaagggtaaaatagcagaagaaaagaaaagaaaaaatattaaaaacattgataaagcaatagaagaacacaacaaaaggaagaaactaatttattattcattgatagcatctggggcaatagcatcggttgcggcaatattgggattaggatattatggatataaaaaatcgcgagaagatgatttatattataataaatatttggaatatagaaatggagaatacaatataaaatatcaagatggtgctatagcaagtactagtgaattttatatagaacctgaaggaataaataaaataaatttaaataaacccataattgaaaataaaaataatgtagatgtgtcaattaaaagatataataattttgtagatatagcacgacttagtatacaaaaacattttgaacatttatcaaatgatcaaaaagattctcatgtaaataacatggaatatatgcaaaaatttgttcaaggattacaagaaaatagaaatatatctctatccaaatatcaagaaaataaagctgttatggatttaaaatatcatttacaaaaagtttatgctaattatttatctcaagaagagaactaa

SEQ ID NO: 281 - DNA, 420 bp, Plasmodium falciparum
atggatgctgttcaaaagagagtattgaaaagtaacccaagcgatttagaaaaagaaatagcacaatgtttgttagacattgaattatctagttcttcggatataaaaacagatgctaaagaaataaaattattatcatgtgatttaatagaagtagaaaaattaaaaaagaaaaccattttaatttatattccttacaaaatttatacaacctatgtaagaaaaatccaaagaaaattaattaatgaattagaaaaaaaaacgaaaaaatatgttgtgttagttgcaaaaagaacaatattaaaaggaaaacaaaaaaataaatctttcaaaattatcccaagatcaagaactttaaccagtgtatatgattcaatccttgaagatattgtatcaccaagtgaaattattggaaagaga

SEQ ID NO: 282 - DNA, 2553 bp, Plasmodium falciparum
tacatttttgccgattcatataaaagtctgcaagtggacaaaagggatattttcatgactataataactgttattagatattactacctcaatatatattttagtataaaagaatttaaacttaataggaaaaatattttctattttcaaatatttcaggaaaatcaaatgaagggtgtttatttgagtgtccgtgataagaaaagggttgaaaatattaaaaaatggtatttaaacagcatgaaaaaaataaatcacgacgaaatactagaaagtttaaaaaattcatccataaatataaataataaaaactttatgatatgtaccaatcatgagcaagatacagaagaaaaaggaaatacacaaaataaggagaagcatgatatttatattggaccaatatataataattcgttcgacagtacaacaacaacacatagtagtaataattataaagggaataatatccatgtgagtggggattataagaatgatgggctattacataaaggtaataatagtatgaatgaatgttatgtgaaggacataaaatgtaataataataataataataataataataacaacaacaataatattaataatagttataataaattaaattgtgttacgaataatagcaaaaatgacataattaaataccacaaaactatcgacacagataatagtaaaaatcatacatactttaaaaataaattcctaaattttttggataaaaaaattattagtaatatatatggcttaccacaaggttttagcttatctaatatattgtgctccctatattatgcatatttagataaaaatgaagaatttcaaaatttattatattcagaaaaacaaatcaataataaatatttcttagcaaatggaacttgtaattatttcaatttaaattcactcatactccgatttattgatgactttttatttataactcttaataaaaaaaatattaaaatatttaaaaacttactattaaaaaaaaaaatatggggaagtaatattaattcatccaaaaccaaaatcttcaaaataccacttatatataaaaatgatttactaatatataattttcaaaataaataccaacaaaaaaaaaaatacaaaataaaaaataaaaaaaaaatacaaagtgtgaggaacaaacggatacataatcagctagtcaatgctaataaaaaaaaacacacatctgtacaaaaagataaaataaataaatatataaatctcatacatccaacaatacaaaaaaatgattctgtcttgtcttctaattctattatgaattttgaaaggatatataataaagaaagtcataaaagtaacagttcaatacgtacggatattccgaatagtgttgtaaatgacgatatagaatataatcaaaaaagtgataataattcttacagtactaataatttatacaacaatataaatatgactcaaaatggtgataataataatgttaatatttttaaacatgtacaaaatgattcttttcaatgttttaatagtaacaacttatatattgaaaaggatataaaagaaaataatatttcacaaatcaacagaaagttatgttctaaaagaaattttacaaaaaaaagtagaaaaataaatactttgacatatttacaaattgataaagttataaaaatcctaaaatgtaagaagaaatatataaaacatataaaaaagatgaagtatatgaataattttcaaaattttaaaaaattaaaaaaattacaaaaatttcataatgcctcttttgaattaaaaattaataaaattaataaaaatattagacgattgaataaattaaaaaaacgtaaaaatcattctataaacattactcctgttacttctatagaatggttaaataattcatacacatttgattttataaataattctatacaaagcacttcatatccatggaaaaataaatgtgatgctactattagaaatcatttacatctacataatgttattatagataaaaataataaaacttattttatgaaaaacctagttgaaaatagaattgtacgaaatattatatccaaacaaaaaaaatgtcaatccttatataagaataagcaaaatgtatatttctgttataaaaataattttagcttattaaaatcatctatattaaaattcatctgttgtattaaaacactcaaaaaaatgtttaatgcatttacaaattctacatataacacaaaatttatattatttctcatatcgtatatgaataaaatgttaataaaaaataaaaaactcaaatttgtcaaattgtttttaattcaaacagcaatcgaagccttccgttatgccagaatttttaatcagcaggattccttttatccgtgtctccaacatttcaggaaaatcaaaaaaagattaattaacaaatacaaaattggacataacaaaaatttattgcgagaattttttttcctgtttaattttatcaagaaagagttgtataattcatggccttacatgttcaaaataaaaaattaa

SEQ ID NO: 283 - DNA, 1131 bp, Plasmodium falciparum
gaaaccattaaagtacctagacttggtgattcaatcacagaaggtacaataaatgaatggaaaaaaaaagtgggagattatgttaaggcggatgaaacgataacaattatcgatacagataaagttagtgttgatataaattctaaagtaagtggagggttatccaaaatttttgcggatgtaggagatgttgttttggtagatgcacctttatgtgaaattgatacatctgtagaaccacctgaagatatttgtaaaactaaagaggaagtaggagaaagtaaaaataatgaaaataattatacatttaatcaattaaatagagatattaaagatgaagcacatataaaagatgaagttagtaaaaatgaaaaagatatttttgtaaaagatcctatatgttttggaaatgattatgaatcaataaatgaaagaacagaaagaagagtccgtatgttacctataagaaaaagaattgcagaacgattaaaggaatcacaaaatacatgtgctttattaacaacatttaatgaatgtgatatgtcaaaggcaatgttattaagaagtgaattaaatgatatatttcaaaaaaaatattcatgtaaattaggatttgtatcattatttatgtatgcatcaacattggctttaaaaaaaatgccaaatgtaaatgcatatatagaaaatgatgaaattgtatataaaaattatatagatatatctgtagcagtagctacaccaaatggcttaaccgttccagttataagaaattgtcaaaataaaaatttaccacaattagaattagctttatctgatttagctacaaaagcacgatcaaataaattatcgattgatgattttagtggtggtacatttacaatatctaatggaggtgtttttggtagtatgttaagtactcctattattaatatgccacagtcagctattctaggaatgcatacaataaaaaatagaccagtagttgtcaataatgaaattgttattagaccaattatgtaccttgcccttacatatgatcatagattattagacggaagagaagccgtacaatttttatgtgcaataagagattatatagaaaaccctaatctaatgttaattgattgttaa

SEQ ID NO: 284 - DNA, 1218 bp, Plasmodium falciparum
ggtgtggctagcatgaatgttaccttaggtgttcctagaataaaagaaataatcaacgcatctaacagtattcaaacaccaatattaaacatccctttagaagtgaacgataattataattttgccctaatgatgaaatcaaaattagaaaagacgacaatacgtgatatttgtatgtatataaaagaagattatactagtcgaggtgtatttctatccgttaagtttaacgaagaattaatacagaagctttttctaaatatcaatgcatacaatatcaaagatattatattaaaacaaagtcatattaataaaataaaaattaataaaatacatattaatgtaataaataaatataaattacatatttctttaaaaaatgatgaatttatattttttcaaatggaatccttaaaaaagggtttactagatctcttgatttatggagataaagatattaaaaggtgtatcataaaaaaagaagatattgaagtaacagataatgaagatgaaatatgtgatgacatggatgaatattataatgtttctcaagggacagagttatatgaaagaaaatgtaatagtaaagaagaaaataaaaatgctattcgtgttaagaaagaagaaattgatgataatctcgagaaggaagagaatattatttatgtgtcagaaaaggatagcgttaatcaattgaaaagtgaaaaaaagaaggatattaatgatgataataataataatgatgataataataataatgatgataataataataataatgatgatgataataaaattaatgatactatttttaatgatgacattaacagtgatcgaaacaaccttaaagaaaatggtagcaaattagaaaatgtcggagaacatattatagaaagattaagctacaaaatgaaagaaaaaaatgttaaaaaagagcatataaaaaaagaaccgaaccttataaatttagacactataaatttagatacattaaactttgacgaaataaatgtacataatataaataatgagaaaattgaattttatgatgaacatttaaatatatgtcagggaaacaaaaaacatattcaaaaaaaaaaaaaaaaaaaaactgtatactcaatattagtagaaggaaattcgttgaattatgttcttggtttagaaggtgttgattttaagcatatcatttctaatcatgtcataaacgtttttcaa

SEQ ID NO: 285 - DNA, 1536 bp, Plasmodium falciparum
atggcttcgggaaaaggtaaagaaaatatatcgacaaaagatacacgtaatgatgaggataatacaaataagaaatattttgttgatgttataaaaaggttgaataagaatgataataagaaatattatttggatgaagaaaataaaaccgagatccaggatgcagaaacaaaatttaagaatgaattgaatgaagaaatatataataaagatgattatataatatatgatgatggaaatccagaaattcaattttttacaaataaacaaaaattaaaaatagctagatattcttggaaagcagaaaatcctaaagcatatgtttttgctttacatggtatcacatctcatttgagaaatgaatatttgaattattatggtcgtcctatatgggctcataaaaaggatgaggtacatgataataatatatcgagtgacgataataataatatacctagtgatgataataataatataccgagtggtgataataataatataccgagtggtgataataatagtaataataataataataataatgcgaacaatgattataaacctcgtttagataaatatacaaacgaattgaaagagtcggaaaagaataataatgattatataattaaggataatttaacaaacacaattaattatggatatcataggggtaatgtaggtgaagatattaataacgacatagagaaaacccatgaaagaggtaagagcatagaagtaaagagcgaagtaaatataccaaaatatacatcgacatcatcactaaataaagtaaatggtaacaataatatagaatgtgaaaacttaagaaaaaacagtttaaaaagtagagaatcctattttatgaataatgaacctgagaaatcagtattaaacgaaggagatgtatatgagagtacatcatccttatcatgtagttcatccgaattaatggataagaaaacattggaaaagaaattgactatgtttttatcatgttcttcttgtatgtctaattataacgaaaatacaaatggtttaaataatgataaaaagtttgaaacaggttcagataatgaaatgaatagtgatgataatatgatggttgatgatgataatgttttattaattgatgagaattataatagtagtaatagtaacaataatagtaaaaataatggtagtagtaataatagtaaaaataatagtaaaaataatagtaaaaataatagtaaacatagtagtaaaaataatagtaaaaataataaaaacaataataaaaacattaataatgatagtaataataataataattacgacggatgtaatgataatacagtttattattgttccatgtgtggatctgtttgtaattattgtaattgtggagaacgtactttgtcatataaaaatagttggatagaaaaattaaatgaaaataatttttcttttttcggtatcgacaatcagtcacatgggttatcagaaggatcaagaaatcagcgatgttttgttgaagattttgaacattttatatca

SEQ ID NO: 286 - DNA, 2787 bp, Plasmodium falciparum
atgaatattttgtgcatccatattgtttactgctttatcgcttgtcttttattatgtaatataaatcaggtgtttacacttcatgtattaaattataataacggttacctttataagaatttatctttttccatccctttatataagaatttatttcaacaaaaaaccacttgtaaaaaaaggaaacaattattacatattaaatcaaggggaagtacatataatgagtgttccaagaattgtgatgcatattttgagttaaataagactaataaaaacataacaaaaagaattggaaatattccaaatgtattaagaaaagaagaaaaaaaaggaagacatataataaataatacgaaagaatcaaacaatgaaaattgtagatataaggaagaaaaaaatataattataaatgaaaatggtgataaatcattttatcagggagatgatatagaggaagatttatttaattcaaacttgaacattttagaaagtgaaaaaaaatatagtagacaaatatatacacacggatataatgaagagaaaaaaattagaggaagtaaaattattattattggattaaatggaataagttgtgaaatatgtaaaaatttaagtttatgtggtgttcacgaaataggtatttatgataataatcttttaacatacgaagatattgataatctttatttatgtaataaaaaattagtaaatgaacaaataaaaagtatatcttgcgtagataatatacagaaattaaatgaaagttgtaaaataaaagctataactacaaatttatatgataatattttaaattatgatattgtggttacggtaaatcaaaaaacaaatttcaacataaaattaaataattattgtagagaaaataaaaaaaagtttatatgtgttaatacatgtggtttatttggtagagtattcattgattatggtgacttttattatacaaataatattgatactaatacgacatatgataatcataataatattattagtgatttgtacaaaattaataatcttgaatttctcaaaaataataccattgtcttatcatatttacctttttataatatgcaattaaatgaaagtgataaagtaaaattactcttaaataataattcaggaaaaaacatacaattagacaatcttatcattgatcgtatatgtagaaaaaatcataaaatttatttatctatttcaaaaaataaatgtaataattcaatttttaaaatatttaatcacatatttcaaccattctttatcaatcaattatttccttattttttcaattcttttttttacacatatcctctgaatttaatatcatatttattcaaatttaacaaaaacaaattcttatataataattattcgcatttttttaatattaaaaaatttgttcaggaaaataaattaaattattccatcagattgataaaattacctgaacagttcaggttgaaatatataagtttagaggaatatataaaaaagcaaaaaaaaaaaacaaaaatatataatatatataataatatgtttaatatatataataatgtgtttaatatatattatatatacatatatataataaagaatacattaaaattaataaaagaaaatattagatttgtattaaaaaatatatatagaaaattatatggaataagaaaaaatgagcatgaatataaaaatgtggataaattaaaggatgaagaaatttgttttatgatatatgatgaaataatgaaaaataagaataataaagaattgtcagatgatgatataaagaaatttacatatttatgtaagaaagaaaagaaagatataagtaatgaaataataaatcaattttgttcatgtgctcatattgaattatctcctttttcatttttctggggtgcattattatcacaacaaatattgaaaggtataacacataaatttaaacctatacatcagatgttttattatgataggagagatttgtttccgttttctaatatatcaaaaatgtattatggaaagtatatgcatgaaaagaatttttttggtgaagaatttcacaaattcttaaaaaaattaaatattttattgattggatcaggtgctttaggttgtgagtttttaaaactgttggcaatatcaggtgtttcatccaatatggataaaatatcaaatcaaatacataataataaacaaaataacgattttaataatataaagaataaggataaattagatagtacttcttctaatttattacatacaaatcaaaatacaaatgtatatgttccaagtaatatggaaaaaaaaaacaatcatgttatattacaaaataaagaaaacaatatacaaggttgtgttcaggttgttgattatgattacattgaagaatcgaacttgtctagacaatttttatttagaacaaaagacattaataaattaaaatgtcaaatagcttgtgaaaatattaaaatgataaatgatgatataaattgtgattttttaaaaatgaaagttgatgatactatttttgataataaagattttttattaaaaagatacttactttttacaaataaaaagaatgagattgttaaaaaacaaaaaacaaaaaatatacgtgagaatcctcttatatgtatcttatgtctagacaatttaaaaagtcgtatattaatggataaattttgtttattgaattcaatacctttaattgaatctggaatcgaagggttaaaagcaagtagtcaagttgtgtatcca

SEQ ID NO: 287 - DNA, 1575 bp, Plasmodium falciparum
atggtcgacgataagaataaggacaagaattgctcaaaaaaagatgagaaaaataataagatagatgaagataaagaatttgatgaaaaagtaaaaaatatgagttttgatgataaagtaagaaaaatattagatttaaaattagaaggaaataatgattataaaaataagaattatgaaaaagctataaataaatataatgaaggaatgaaatatatgaaaaaaatagaaaacaaaaatgagaaaattaaagagttagaaatagctttatatttaaatttaagtatttgttattcaaatgtagaaaaatataatgaagcttatgataatattactaaggttttaagtttggataaaacaaatgccaaaggtatgtttcgattatgtcagatcgaatttaatcgttgtaatttcgatgttgctaaagataagattcaagaatttattaaaatttatccagataatatagaagccaagaaattattaaaaaacattattctaaaacaaaatgaacataataaaaaacaaaaagaagcgttttctaaaatttttgaaaaagcttcaggactttatgatgacagagaaaaagaaataatgagaaagaagaaagaaaaatatgaaaaggaaatgaaagaaagaaaagaaaaaaatgaagatattataaaatttgaagaatgggaaattctagataatgaaaaaagaattaaagaagatgaagagaaaagaaaagaaaaagaaaaagaacgagaaaaacaaaatgagaaggaaaaacaaaaacaaaaagaaatggaaaaaaaaaataaaaataaaaatgattccttaatgtctagttcaacaactaataataattcatcttatttagatatagatgaagaagatcaaaaaattattaatgaaaccaaaaaaatgggatattgttattttaaaaaagatattaaagaagatgataaaaaattctttgaaaaaaatattcccaaaaaaattgatacaacaaattatgaaaattcaaatacattatacaataatcaaaataataaagctatatcatcttggaatgcagcaggaactacatatgaagaaaaagatatgactaagtgggcaaaaaataaaatagaggagtgtttaaaaaatatacattttaaaaatgatgacgattcagattttttaaatctaaataatcaaaatggaaataatttctcatcagtaaattatccagatattttaccaattcaatatttatccaaaatacaattaaatgatgtaaaaaatttatctgttgatgctcaaatagttgttataagaggtacaaaaagacatatttttgaattgtcatgtaatttagatattaccattttcattaatataacagaattacatgtgcataaagttcttgtagaaataaaagaactttctagtgaactagaagctggaaaaacatggaaaaattttattaccattaaaaagaatgataagttaaaaattccggataacctttttaatgatatatatgatttcgtgattgaaaaggtccaacaacaaattaaaaattttacgcaagagtataataaaatgtaa

SEQ ID NO: 288 - DNA, 1056 bp, Plasmodium falciparum
atgaagagtaatatcatattttatttttcttttttttttgtgtacttatactatgtttcgtgtaatcaatcaactcatagtacaccagtaaataatgaagaagatcaagaagaattatatattaaaaataaaaaattggaaaaactaaaaaatatagtatcaggagattttgttggaaattataaaaataatgaagaattattaaacaaaaaaattgaagaattacaaaacagtaaagaaaaaaatgtacatgtattaattaatggaaattcaattattgatgaaatagaaaaaaatgaagaaaatgatgataacgaagaaaataatgatgatgacaatacatatgaattagatatgaatgatgacacattcttaggacaaaataacgattcacattttgaaaatgttgatgatgacgcagtagaaaatgaacaagaagatgaaaacaaggaaaaatcagaatcatttccattattccaaaatttaggattattcggtaaaaacgtattatcaaaggtaaaggcacaaagtgaaacagatactcaatctaaaaatgaacaagagatatcaacacaaggacaagaagtacaaaaaccagcacaaggaggagaatcgacatttcaaaaagacctagataagaaattatataatttaggagatgtttttaatcatgtagttgatatttcaaacaaaaagaacaaaataaatctcgatgaatatggtaaaaaatatacagatttcaaaaaagaatatgaagacttcgttttaaattctaaagaatatgatataatcaaaaatctaataattatgtttggtcaagaagataataagagtaaaaatggcaaaacggatattgtaagtgaagctaaacatatgactgaaattttcataaaactatttaaagataaggaataccatgaacaatttaaaaattatatttatggtgtttatagttatgcaaaacaaaatagtcacttaagtgagaaaaaaataaaaccagaagaggaatataaaaaattcttagaatattcatttaatttactaaacacaatgtaa

SEQ ID NO: 289 - DNA, 2484 bp, Plasmodium falciparum
atgaaaccaaatgataatttagaaaataacatgaatttgagtataggaaaaatagatttgagtaatatttatatggacatattacacatacatgaaactcttgtaaatcatattcaaaccatcgttacacaagtttatagtttgatagaaaagacattatgtgatcacatcgaaagaaataaattggacatatatatgtttgaagaaaagtataaagataataatataatagatggggataaagataaaatgataatccattctttaaataatttgaataataattattttggtaacgatataaaaaataaatttattttagagaaggtaaatgaatgtatattagataatgagaatgataaaaaaaataagataaaaataagttctaagaagaaatattttaatgaattactaaattttggtaataaaaataaaaatgtacaaataaaaacaataactagttcgatatgtacatataaaaatggagttgatgatgaacatgaaaatgataatgatgatgatgataatgattgtgacgataatgattgtgacgataatgattgtgacgataatgattgtgacgataatgattgtgacgataatgattgtgacgataatgattgtgacgataatgattgtgacgataatgattgtgacgatgataataataacgataatgatgataattatgaatgtataaatattgatgataataatcttataaacagcataaaaataagaaacgatgaaaataaccttctttttaataataggtatacgaggaatcatcacgataataattctgtaaactgttttatgaatataaataaaaaaacaaaggaagtatataataatgaatgtaataataattattttagagaagagcaaaaaaacaatttgtatgatagaaaaaaacaaaagtataaaaaaaaagccgaagatgttgttcataaagtaatgaataataaatgtatacaaaacgaaatatatgaaaataaaattaaactacaaaaacatatagctcttttggagcttattaaatatgttattttgtattcaaatacaaatataaaaaaggaaaatacagaaataataaaaaaaagggaaattaatgaaattaactcatatcaaaatgggaatgttacaaataagagatataaaaagggtttacataaaaatggtatacatgaaaatgacttacatgaaaatgacttacatgaaaatgacttacataaaaatgacttgcataaaaatgacatacataaaaatgacatacataagaatgacatacataagaatgatttacgtacaaacgacttgcataaaaatgacatacataagaatgatttacgtacaaacgacttacataaaaatgacttacataagaatgatttacgtacgaacgacttgcataaaaatgacttgcataaaaatgacttgcataaaaatgacatacataagaatgacatacatacaaataacacatgtcttaatgacactcatatgagtataaatccttatgataaccattacacagaaaaaacaaaaactgatttgaatcactccgaatatgataagggaataaaagatgaacatacaaatagtaatattaacttatcaaacgtcaaacttaaatatattaatattataacttattatatggatttattatcaccatttaataaatgttattctgaaaaaaatggtacaactaatgaagatcaaaagaatttaaaaatggtatgtaaaaaattagatcaaattgtattgaattatgaaagtattatcgaccaaattttaaaaaaaggaaatctaaattattctgatataaataaattgtatcaagctcataaccataataatatggaagaatattcctcatctcaattaaatgatgaaaatcaatgtgaaaataaaagggtacagaacaatatgtgcataagtattgataacaaaataaatatgaagaacaaaagtattccgtgtgaatgtacaaaatgtttggaagaaaaaaacacaaacaagtttatggacaccgcaaataatgagaaaaataaaaataataacataaataaaaataataacataaataaaaataatgacataaataaaaataatgacataaataaaaataatgacataaataaaaataatgacataaataaaaataatgacataaataaaaataatgacataaataaaaataatgacataaataaaaataatgacataaataaaaataatgacataaataaaaataatgacataaataaaaataataacataaataaaaataataacataaataaaaataatgacataaataaaaataataacataaataaaaataataacataaataaaaataataacataaataaaaataatgacataaataaaaataatgacataaataaaaataataacataaataaaaataatgacataaataaaaataataacataaataaaaataataacata

SEQ ID NO: 290 - DNA, 1227 bp, Plasmodium falciparum
aaattacttgctcccaaaaatgacgtcagaactttgaaggttcaaacagtagcatcattttgcaatgtgaaattaaatatgccgaactttgaacttggtaaagataacaagacagccgattttttaaaacactctccgctaggtaggttgcctgttttggttacgtctcatggttctatttttgaaagtaatgctgtttgtaaatacctttgtagtattcatagagaaggggattatttaggtaagggttcttttgaagaagcacaagtaaatatgtgggtagatttcaacacatacgaattagaaattcctatgacttgttatatgaataataaatcctgtgagaaatctttaaaacatatagaagatactttaaaatgttataataatcatttattatataatcaatatatggttggtaattcaattactattgcggatatctttatttctgtcatattatatttttctttaaattctggtgctttgaatgaatcgatagttttgaaatataaaaacttatatagattatatgacactataagtaatcaaaaacaatttaaatatgtttttgcttgtgatcaaaataaaaagaaaaacacacaagataaatcaacaggtgcaaaaaaaaaacaaggaaacaataagaaagatgataataataataataataataatgatgctgataatcaacatgctgatttattaagtgatgatttggcagaaaaaaaacagccaaaaaaaacaaacccattagatttattaccaccatcgaatttctcactggatgaatggaaatataaatttagtaatgaaaaagatttattaaataatgccatgccacatttctggaaaacatatgatccaaatggattctccttatattatatgaaatatgataaattagaagatgaatgccaaatatcatttgttgcatgtaatatggcaggtggattcttacaaagacttgaaaacaatttctcaaaatattcatttgccgttgttactgttttgggagaaaataaatcatatgacatcgaaggtgtctggttattcagaggtacagacataccttttgaaatgaaagatcacccttcttttgaatatcacatttttaaaaaattagatattaataatacacaagacaaaaaaattgtagaagagtactggtgctcaaaagaaacggtagataacagacctcttgtcgacagaaaggtatggaaataa

SEQ ID NO: 291 - DNA, 660 bp, Plasmodium falciparum
ggaaacgttagtactaatgttgacgttgtgaataccactcaaggattaagcaaaggaagaattttaacacaaggagatcatcacgaagaaactgaagatgtaaaccataaggctcatcatactggagaacgtactagttatacagaagtaaaacatagacgttcatcttccaattctcatgtagaatcaaacacttttcaaaataaagaagaaactgaagtaaatgctgattctgcagaacaacagaattatgataaagaaccaagtcaaaaaggtaaagatgttaaaaaaatgttaaagaaagctgataattttattgaaaccaaattagttagtgctttacatccaaaaaaaaatcacttattaaaattagccattcttgcattcccaatattcatggaacatgtctctaatatatttaaaagaagaggattcaaatatattggttctgctatgcatttagtttgtcttgtattctatgtttacatatttaaagtaattgttaatcatttattaacaaataaagaagacagatttgctcatatggaatcacatggaaaacatgcttttgatgataataaatctaaaaaaaaaccaaaagataacaaaagatacggatctggaagtcacgatcacgaggaagaagtagttgaagcttaa

SEQ ID NO: 292 - DNA, 1341 bp, Plasmodium falciparum
aataacggagatcgaaattccttatcatgcgttgatttgaataatgtatattccagaaatttgtctgaatcacaagaaaaccataattcgtcctttacaagaactaatttggtagagaatgaaaacgaagaggatgatattttcggtgttcatagagatgagtcatttgcagagactgttttgaatggacaagatattattagttatttagaacatcaaaataccaaaattcatgaagataatattcatgatgatatttcacatacgttgttaaatgagggtgatgtacaaaattattatgatgtattaaatgtaaatgagcactctgatctaaatgaacttaaaagaaattttcacaacttatctttacaacattatccaaagataactagtgataacagctttgagttaaatgatgaatttaatcaattaagtgaagcatatcaagtattaagttatcaaataagaaaaaatatttatgataatgaaggagtatatggaacaaaaaaaatggctatagtaaatccacttatatattttaatggaatatttacaactcaattaatgcatgaatatatcggaactaccgaggtagcccaatttgttcaattatttttagaaagaaacattgcacctgaaaatatagtatctttccttgaagaatctgttagtgatatgatgaaagggcaagattatagagaattacaattaactgaattgttaaaacaaaaattagatttatatatcaatgatgatgaaaaatggcaaaatataattaaaagtgaaataaatgttttaacaaaatcaccattctccaaattcattttagaagctgtgggttggacttatgaaaatgtaggaaatatatatatggaacaaacagataattttgataacgtatatcatggtatatatgtaaatttagctgatgaaagaattaatagaaattatgctattttggatgaaaatgtaaatgattttgtttcattattaaaaaaattttatccttttaccgaaactgttaatccatatttaagaagagcaaaacataacttaaataatttacaaggtggaatcaataacttatacagtagtgttaatgtagtatatgataatttatttaatgaaaatattaatatatcttctaacgaacactaccatttattacaagaattattaaaaattatattaaacatcaatttgtgcgatattgaggaaactataagagaatgtgcatataatgtactaaaggataaaacagtagatgcaagtgttcattcaaaaagagctcacagaatgaatatattaggaagcttaatgttagaaagttctaatgaataa

SEQ ID NO: 293 - DNA, 894 bp, Plasmodium falciparum
atgttgagtgttaacaaagttaccgctttattatttttctatattttactcataaaaggatattatggaaggaccgaaagtaaaaatatattaaacactgtaaagaatgatgtaaaaaatgggaattatcagaatatgatgaattttccagatatggataaaataaaagaattaataaatcagaataaagttgaagaagcaagagaattatttaatgaaatgcaaaaacaatttatgaaagaaaaaatggaagctaacaataatatgaataataaaaaaccagcaaagaaagctatggataatagtaatttatttagtaatttaattaatcctaatgatcttcaagaaatgattaaattttatatgtacttacaaaatatactaaattccaaaaacgaaacttcagaaaaaaaaatggttaaatctttcttaagaaaaactatccaaaaaatgaaagataatgaaaatagtgaagaaaaaaaatctattgatgatataataaaagataccgaaggacacaatgaaatgttagaaaaattagcaggtcttatgaaaattaacaaagaaaaattaaaagatgaacaagttaaaaataaattaaaccaaatattaataggtatgctcaaattcatagattatactaataatagtgatataaccaactcattaatggatgaaattcaaatcgaacaagtacaagcagaggacggaacaatcaaaccaaaagttcaagttaacataagtaatagtaaagcacacttagatatgttacaaaaagctaccaattttatgggtattaatattgatcaagaagaattaaaaaaattaaccgttaataataaatggtatgaaagctttttaaataatctacttaacagttcagatgaactctaa

SEQ ID NO: 294 - DNA, 1065 bp, Plasmodium falciparum
attattataagcgcagtttcagattacctgaaaaattattgtggaattataattacacataactacgatttattaaacaaaatatgccagagcgaaaacatcgtttttaaaagaattagtaaagatattaactacctgaaagaacaagataataaaatagttggtaaattagaagacggtatttgtaaaaacagtgaagccttagaaacatgtagatatacaaatatagacccacatgttttaaatttattaaatgtatatgaaaaaaaatataaatttattcataatttaagtaatacactatataccaaatttttagaatatattcaatatagaaaagatgggaagtgtctcaatgacttttttgatcaatatataaatgatataataaaacaaaagagtgataaacatgaaatacaatataatacacctagtaatatggaaaataattataatagttatagttcaaatgatcaaaagaattatatatcagaaaatcacaagtatgattataattatgatatcgattacataaaagataaagaattaaaaaatataataaattctaataataatatacaagaatttttaaacaattatgataagacaaggatacataatgataatccaactaatcataaaccagatcaatatgataactcattagtttatgatgataaactaaatgttataattaaaaaaattgaagaagcatcaaataagaaggttataaaaataggaatgaatgaagaagtacctatttattataaaaataaaagtattgtatatattttatgtattttttcaaaagatgaaaatgatccatatttttatataggtataagtgataatatttcagaaaggataaaatgtcatacaagaaatctattaaataataaaaatcttttaaaaaatccaaagaaaaataatctattaaattataaatatgattggactaaattctatattttactttttcatgttgataataaaatggttgcatccaaatatgaaaaggacctttcgaatttgttgaagaataattataacatattatctaaataa

SEQ ID NO: 295 - DNA, 1158 bp, Plasmodium falciparum
atggaaaacgagtatgcaacaggagctgttagaccattccaagctgctgaaagtaatgaaagatatcaagatcctcaaaattacgaactgtccaaaaaggcagtaatatttacgccaatatattatttcgatgggaattcatggacagctttagaaagattattaagtcttaaaaagaccatatttcatgataatagacttgttacattgtgccctgtggaaaataatataaccccgatcgaactggaggcttctattagtggcaaatatgatattaaggtttatagacattgcgaatatattttatgtattgagggggaacagaaaatattaataaaaatacctgttacgaaaaatattataacatggaattctgaacaacgccttccattactaccaaaaacatggaaacctaccatttttcttttaaatgagagcaatatatttcttaggtttattccggataaatgtttagttattagccaggtgagtaatagtgattcatataaggtaaattgtattaatttctctgaaggattttgttgctgtcatccaataaataatttagcactattatatggagagtatcaacaaaatcaagaatcaaaaattatgaaattaccgaaacttcccataagtaatgggaaatataattactttatacatttttttacatggggcactatgtttgttcccaaatattttgagttatcaagaggccctttatgtaatttcaagaaaaatatcattgctttattaataataccaccaaaaatacacatttctattgaattacatagttcctctcctgtagtatgctcaatggaatataaaaaagattttcttattacggcaagaaagccaaatattacagatatagagatatatacaatcatacaagatcaattaataaagtatgatttttcatatgatcttcgtttaaataaagaaaatgcttcaatatcacatttaaacattccaataggttttaaaatatgtaatgaagaaaaagagaaaaaaaaaaaaaattcttctcatatatgcaaatggacatttattgaaacaaaagatcaaagaacattaaatagatcaggaaactcatcatccgaacatatcatgtctcaagatttggcttgcatatttgatgcagaaaaaggt

SEQ ID NO: 296 - DNA, 2325 bp, Plasmodium falciparum
ttatattttttaatattttcaaattatttcttaatatttaatatgtgtcctcatccattaatacattttacaatgaacagtttccgttctagattttcctctattatcaagaaaaatatattttattttaattttagtcgttataataatataacgacagatttatatattagtttatgtagtgctttagaaaataaatatatattagtaaccagcccgacatgtataaaatcattatttttaaaattaatttcaactatacaagaattaaatagtatcaaaacatttgacatgttaaaacaaaaggccaaaacacatattacagatgctttaaccaaatttttaggttttcagaatgaagaaacgaaaggtataaattctggtgtatcaaatacgatgtcattagcaaaaactagtataaataacaacaactataataatattaataataataataataataatattactatgggtacacaattttcaaagaatggttccatgagctctattccttcggattacaatatgttaaagaaacagttagatttatgtgttcgtatctttgacatattaaataagagtattttattaattgatgaagtagataatgtattacatccattaaaaagtgaattacattggccttacggtattaatagagatattgatttagtaaatgtagtacgaaattttacagatatatttatgaataatccatatttaaaatttttatataataataaggatgatgaaaatgtagatatcaagaatgtaaaaatttcgataactaatgagatgaaggcaaatgataatttgatatataatataaaacatttgaaggagaatgaagaaagagagagagaacaaaataaattattaattaattataatacagatcatatgttaaaaaatgaatataatatgtataataaaatggaggatatgataggaagacataagaattcgattgatttaggtgaaaagcatattatgatgaataatatgaattattcaaaatataaatctcctttatataataagaagaaagaagatttatataatgatcatcatgatgataatattataaataataaaagtacaggatgtgtagtaacaagtggtgatattgtcaaagcattgaataatacagagaaagatataagttttactcatattgatttaagtttatttagatataaattatgttggattttaatcgatttctttttctatcctatatgtaaaaaattgactgttcctatgaatgtacattttaatataaatgctgattatattaatgatttgttattagtttttaataaggaagtagatatcggtgtaaagaatcatgatatttcttttataccacattttcatataattaattataaatggtatgataatatcgtatggattttagctaggtatacttattattttttattatcgtataagttcaatggtttatcacaaaagattgtggaatcgtatttatgtattcctctttgtattggatacaacgatattgtaagtaataaaggaagaaataataatggaaacatgaattatgctactatgagaagattattaaatataaaaaaaattcacaataaaaattataatatgaatataaataatgtacatatgaataacatgaatgaatctgatatttgtttttctaatgattatcatttaaaaattttcgaaaaaataaatcaacttgaatttgtattttgtaaaatgttaaatttatgccgtctatatattaatggaatattaccattcgtatttacaaaaattaatacagtgcattatggtatattatccgttgaacaaattaataagtgtaaaattattatgagtaaaagtagatatttcttagcagtaccttatataggaaaggatacaccttctagtatgtctgaatatactaatgtggatgttgtagtagctttaactatattatcgtatagatatcaaggaatgaggtatgttgattttatgctgtctcttaagaatattttgtataattattcattagaaaaggataatgagcatatacaaaaggatacatcagacgatagttctgatacgactttgaacaattttataacggatgaaagttcaagtgaatcttctcattctactaaagcgttgtcagaagattctacatctaggaaaagaaatatatccgagcgaagagacaatatatcccaatctttaatatcaaaaagtatagacaatgtgaatgattcggaaaatacagaagaaagtttgaatgaagaaaatggacaagaagattattcttccaatattgaaagc

SEQ ID NO: 297 - DNA, 1884 bp, Plasmodium falciparum
aataataaaaatattgttgaacataataatatagataagatagataataaaatagaaaagaaagagaatacatataataagaatattctagatataatgaatattaaagattgtggtcaaaatatgttaattgcttgtaataatattaatataaatatttataattataatttttggtttactcctatagaaattagtgataagaataatttaagaaaatatttgtcaagacaaatacaaattgtttatagtgtttgtaaattttttaattctgatcgtaaatttattgatgctcatgtaaatttattattacaatatttaaattttaatccacctaaacatcgttttaattattttaacgaattatatttaataagaagacttatgaaagaaaaccaaaatagtggtcttaaaaatattgaaaagaatttttatgcacctaaaaaattacaacttgaaattttagagaaaaaattatttgaaggtaatggtgatatatacgcttttaaagttattcaggaaagggtaaggcaaagtttaaaagggaaaaatttaacattacaaaaaatatttgaaaaagatttaaattatatatgtactatggaagatataagaatagtattcgattatttaaatataagggataagaattgtattaacatattatttgatgtattaggaagaaatattactctgcatgaattatgtttatttcttaatcccgtagaaaatagaagagataaaaagtacaatcgtttagaaaaaaataaaaggatgaatggaaatatgctacagaatgatatgaattatataaataataatatattacaaacacaaaatataggtattcaaaataaggggaacaataataataataataataattacattgatcatcaacataataatcttataagagatatcgaaaaacatttaaagaattttagatttagtttaacagaacatacacatatgaaattagtatggtcaggaaaaatagcacaccagagaatacatcatgatatgacacatgagaataataaaaacgaaatgtgtagtatgaataatataaatccttcatcatataattttgctaaaaatgaatcacaccacaacaatatgaataataacaagaacagctttagtaataataataataataataataatcaatatgattatgtgaagaaatcatcaacaaatgatttaatcagtgatatattttatacattccaaaataaaacccataatagagatgaaataaatctattaagtaatacaaatcaacaaaataatattaataagatgtcatataatgaggatatgttttatatatatgaagctgaaaatgttgatccaaaggatagaggaattatgagtaaaaataaacataaaattgtatgcggtcattacgcatcaaataaaatgtatgatattaataataataataataatataaataataattgtagtaataatatatataacagtattaatgcttttccaattattgaaatgacggatattactattaatagtatgtatacaagtacatcaggaaatgatatgctaaatttattatttccatatccaaaaaaatatcttttattatggcatgaagattattctttaaaaaatgtaaatgaatgtttacatatatggaaacctatcttgtcttcttcagctcatttttccaataatatttttgttggtcatgtagctacagtaggaccacaaagcccaccattaaataaaattagagctattccaaaggtacttgtaaaaaatgttcaatcaaaaaaatattccactttttttgcggacaatagttttgctattgataattctggtgttttcagaacattaaacatacacttttttaat

SEQ ID NO: 298 - DNA, 2349 bp, Plasmodium falciparum
atgagtttctatttgggtagcttagtaataatattccatgtactcttccgtaatgtcgctgatggtataaatgtaaacggagataataattatgggaaaacaataatcaataatgatttcaattttgatgattacaattattggacaccaataaataaaaaggaatttttaaattcctatgaagataaattttcaagtgaatcctttttagaaaataaatctagtgttgatgatggaaatataaatttaacagatacaagtacatcaaataaaagttctaaaaaaggacatggtagaagtagagtaagatcagcatcagctgctgcaattcttgaagaagatgattcaaaagatgatatggaatttaaagcttctccttcagttgttaaaacatctactccatcaggtacacagacatctggtttaaaatcatctagtccatctagtacaaagtcatcaagtccatcaaatgtaaaatcagctagtccacatggtgaatctaattcttctgaagaaagtactactaaatcctcaaagagaagtgcttcggttgcaggtattgtaggtgccgacgaagaagcacctcctgcaccaaaaaacaccctcactccattagaagaattatatcctactaatgttaatttatttaactataaatattcattaaacaatatggaagaaaatatcaatatacttaaaaacgaaggagatttagttgcacaaaaagaagaatttgaatatgatgaaaatatggaaaaagctaaacaagacaaaaaaaaagcacttgagaaaataggaaaagaatcagacgaagaaccttttatgttttcagaaaataaatttcttgaaaatcaagtaaaagaaagaaatgttgctggatccttttctcgatttttcagtaaattaaatccttttaagaaagatgaagtaatagaaaaaactgaagtatcaaagaaaacattttcaggtataggttttaatcttactgagaaagaagctaaagtattaggtgtaggtgtaacctatcaagaatatccagaaaccatgttatataactgtccaaacaattctaatttgtttgatactatagaatcattacaaggaagagtaattgatattaaaaaaagagaaagcatgatatcaacaactttcgaacaacaaaaagaatgtttaaaaaatatgggtgtacttgatcttgaattaaacgatacacaatgtaaatttggtacatgtataggtagctttggagaacatcatcttagattatacgaatttgagaatgacttattaaaatttcatccaaatattgattatttaactttagctgatggatataaattacaaaaaaatgatatatatgaattatcccatgtaaacttttgcttattaaatcctaaaacattagaagaatttttaaaaaaaaaagaaatcaaggatcttatgggtggtgatgatcttataaaatataaagaaaattttgataactttatgagtatatctataacatgccatattgaatctttaatatatgatgatattgaagcatctcaagatattgctgctgtattaaaaattgctaaaagtaaattacatgtaataacatcaggtttatcatataaagcaagaaaattagtatataaaatttatagtgaaattcaaaaaaatccagatgaactctatgaaaaattaacatggatttatgataatatctatatgattaaaagatattatactgcatatgctttagaaggtgtctgttcatatcttgaacatgataaaagtcaaatgtatacagaattacatatttataacaaaatagtcgactctgttcgttattatagttcatgctttaaaaacgttattgtttataatgctatcatttctggtatacatgaaaaaataaaacatttcttaaaattagtaccaagacacaactttcttttggattatcactttaattcaatttttgaaaaagaaattaaaccagccaaaaaatatagtacttcacatatttattttgatccaactgttgcatcatatgcttattataatttagatagaagaaccatggttactattattaatgattatttcgaagcaaaaaaaaaagaattaaccgttatagtatctcgtatgaaaacagatatgctcagtcttcaaaatgaagaatcaaaaataccaaatgacaaaagtgcaaattcaaaactagctacaagattaatgaaaaaatttaaagctgaaatcagagatttcttcaaagaaatgcgtatacaatatgctaaattaataaacatacgttacagatctcacttaaagaaaaactactttgccttcaagagattagattaa

SEQ ID NO: 299 - DNA, 1563 bp, Plasmodium falciparum
atgatcacgagtacatatcaccctggagaaaaaattgagaatgagtttttgaaggaaaaaattcgctccaaaattaacgaaatgttaaaatggaaaaggagaggtttcccaggttgtaatcctgtatctttaacaaatcataatataaaaaatttatttacgaaagagtatttaatatgtgagaagacggatggagtacggtactttttatttatagcatcaaatacaacatttttgattgataggaattatgaaatttttaagaatgatatgcatatacctaccatagaagatttatccaaaaaacaacaactaactttattagatggagaattagttgaagatattatatataatgagaagactggtgtagaagaaaaaaaaattgtgtatttgatatatgatggtttatatatacaaagaaaagatataacaaatttatcttattttgaaagattaaccaatgtgtataattatgttataacacctttaaaaaaatataaaaagtctcaaaaaaataaaaaaaacaaaaataatttacaaactaatcatgaaaatgaatctctatatattgaacttgatgaaaaagataatattaaaaaaagaaaaagtaatttaaataatatgttaacggaggaggaaaatgtattgatatctcataaaaaaaatgaccatccacatattaataataaaaatatgaacgctgttaatgtgaacggtgttgatgtgaatggtgttaatataaatcaagactttaataatcataatgaaaacaataatttattgatgaatcagggaattcttatcgacgaaaataataatgggatacagaacattggaacgaatgataatataaattctttaaataattgtaacttacttttgtacaaacgtgaagaacatagagaagaaaaagaatatgaggaagaagaagatgaacgttcctattcatctgatgatactgcttcaacaatacatgaggaagaaattccttttgaaatatatttaaaagatttttatccaatagaaaaaatatgtgaacttataaaaattatgaaaaagctacctcattattctgatggtattatatttacacctttacattctccttatataacaggtaatttttatcaactcctaaaatggaaacctctaaatttaaatacagtcgattttggtatagaaactatatacgatgaatataatattcctagtaaatttgaactctttatatccataaacggagtaaggacatcttataaatgttatcttgctgaatatggagatgtctacaaagaattgttacaattagctatttctaataaaatatcacattacattattgagtgctattatgtttccaaaaatatcttctcaatttgtaaaggtgaaaatggtagagaacaaaaagtagaaggcggatggatagctcaaaaaataagattcgataaaaatattccaaatgatatatcaacactaaataaagttatacaaagtatactggataacattactatagattcattaatcaaagaaatatccagaaatagaaaagcaaagtaa

SEQ ID NO: 300 - DNA, 2706 bp, Plasmodium falciparum
atgaggatggattaccatgataaatataattatttcatgaatataaagcaacattttttctttaaaaaaaagataaaagaatttaatgtaaaattaggaggtgacaatgtaacaaacaaatccttactgaatatatccgaaaaacaacccaagtttgaaaatgaagaaaatgaagatagtaataatataaatgagaattttgaatatgtagatgaaaaaaagaagactaaattaaatagtaagaacagtatgaataataagttcaataataataacatgatgaatgataacaacatcattaattgtaatgataatcctatttttattgaagagagtatacccaaacttactcataacataacaacagatattcaaaatataggtagtaatgaagatacacaagataatatcttatcttcatatgagagtagttgcactaatgatacatattgtagtagttattatataaaggataataatttaaaaaatgaatttagtgattcttgtagtaataatatatataactcaaataaagaagagttaaatgattttatggataatgaaaatatgaataatgtacatgaaaaaaaaaaagaatgtacccataatatagaagatggtaatgctataaatgaaccattatatgtagaacatcatatacgacgaaataatgataattttgatcatataaattataatgaacatggtattaataatgtaatgaatcccgttaataatatgatgagtatacagatgaattatgattcatccataattaatacagataaaaagaaaaaatgtgaacatattaataacacaattgaagaattagataatttatgtttaagtgaaaatgaacacattcagaatatcgaagcaaataatataaacaataaaaaaacaaatgatagtgtgacgaataaaataagtggtgccaaggctaataagggaaataacagtaataataataacaataaatcaaataataacaaaacaagtcataataataagtcaaataataataataaagatgatggtagtaagaataataacaataataataataacaatagtaataataataataataataataataactatggaaataataatagtaaaaaaaataataataataataatgacaataatgataataataataataataacaacaataacaacaataacggtgataataataaaaataataataatgatgaagatgatgatgataatgataataatggagataacaaaaaaaataaaaaggataaaggtaatcataaagacacatcaaacaaaaataataacacggataaaattaatgatagtcatatggttaagtctgataaaaaaaagaaaaatacaaaaaataacacgaataataaaaataattcatccattagtaatactataaatatgaatggttcatgtattgtaaataataataataataataataataataataatattacaaatccaatcaataaaaataatgaattatataataaattgtataatatgaaccctccgaatacatatgataatcatgaaaatataatgaatcctgaagatgttgtaaatataaaacatatggatatgaaaatatatcctaattttggaaacatgaataatatgaatataatgaataatgccaatatgatgaataatgtaaatatgataaataatgtgaataatatgaataatatgaacagtatcaacaatatgaacaatatgaacaatataaattatataaatgatatggtagatacaaatggagtaggcaatttttttaatatgccaaataatggatttattaatatatgtaataataatggtaataataacaataccaataatactaataacaataataataacaataataataacaataataataacaacaacaataataacaataataataattacatgtcaaatataaattatgttcataaccctaattatatacctaatggtaatattaataaattaaatataaaaacaaatatacattctagcgaaaatgatatgatgaataataatttcaatccaaataatggtatgtttacatctagttattctgagataaatatgatgagagaacaagacgatttaaacaatatgaataatggtctctttatgaattacaataataatatgatgatgatgcaacatggaaataatggtgatatattttttaatgaacctaataaagataaattatatttaaataatgaatcattgaataattatcatgatgaaaaaaataatagtaatacgaatataatatttttaagtggtactatgaatccaaaatttgaagaatcaaatattacaccaaaaaatggtttacattatgaaatgttaaataataaagaaattatgaatataggtgaattaaaggttgaagaaaatgatcttatgcatggtatgccaagaaatgattggatgtataataataataataataataatataaatcatatgaatcacataaataatatgaatcacataaataatatgaatcatataaataatatgaatcatataaataatatgagtcctataaataacatgagtcatataaataatatgagtattcacgaagagcaacagaataattttaaaaaccattttgaaaataaaattaatgaagaatcaagatcacataagaaaaataaaaaaagtgtttgc

SEQ ID NO: 301 - DNA, 2700 bp, Plasmodium falciparum
acaaatgtcgaaatggataatttaaatattatgaataaagaagaagatataaataatttaagtgatcattctatattatcttataagtctttaacatcaacttcgcaggataacaatattgatactgcatcttccctttcttcgaaatcattttctgcatcttatgatgaggatgaacattcgaatatttcatcgtatcatttttcagattgttcatctactatatcagatacatccgttataagtaccttttcgttatcgtattataattttgacgagaacatttcaaaagaaaataatgaacataataaaaatgaacataataaaagtgaacataataaaaatgaacataatataaatgaacataataaaaatgaacataataaaagtgaacataatataaatgaacataataaaaatgaacataataaaagtgaacataataaaaatgaacataataaaaatgaacataataaaaaggatgaactcaataaatgtgatgataattcgaataatattttaagtgagaaagataaatattctaataaaaaatatttaaacaaaaaatccttttatttatatgatgtatttaatatagagccaataaaatataaatatttgccctcacccccaataataaatgaagagaaaggagtaattattgcgtgtctttttgctgagtggtattttatttataaaaattacttaaatattttaaagatgagtatatcgaatgatatgcaagatgtagtaaatcaacaacacaaagtaaaatgcataaatttttttcgaaaattatcaaagaatggctttttaaatatggatgaagaaactgatcagttcctatctcattccattaatatttcggttaatatagctttgtacaatttagaaaaggataatatgttacaagaggaattattcgaaagaattcaaaataaagaaaataatgaaaatgaactaatggatgatgatatgaaagaaaaaaatgacgtaaaaaatgtatatacccctctttatgacgatgagaaaaaagatatgaataaagaacaaaaaaatgataatcatgcaaaggtacagcttatggatttacctaagaatgaaatagataaaaatgatgaagagaatttaaaagaatgtccaagtgtaagtgaattattaaattataattatatagactcatggacaaagatgattattacaatgctaaaattagttgatatcgaaaaaatatcaccaatttttatattacaaaaagtgttaaatcttatatgtagagtaatacataaaaaatatgaaagtgaaaagaaacattttaatcaaagaccatattttagattattacattgtttattaattgatattaatgagcaatgtatttattcaaatgatttattgatatatttaaattgtttttctgaaatatttcttttattatcacctttaagaattcctgctttttgtttttcatgggttgaacttatatcatcaaaatattttatgcccaaatttttgtcaaatatttgtggatgggataattataaaaaattattaattcatctttttacatttttaaaatgttttttaaaaaaaatacaagtatccaaagcaattgaatcattatatataggaacattaagaatacttttaatattattacatgattttccagaatttctagctagttattatgttactttatgtagtatatttccaatcaattttattcaattaagaaatcttgtactttctgcatttccaagaaatattaaattacctgatccattcatgtcagatgtcaaaattgatttattaccagaaattaaaatagtaccaaaaattttaacaaatataagtttcttactttttaaaaatcgtttgaaatttttattagatgaatattttcacaaaaaagattataacctattgttccaaataaaagataaattattacttcctaaaaataaaatatatcaatcatttattaaatatgatgtggatattataaattctttaactttatatgtaggaacatatatatgcaaagctaaagttaataacctttttaaatttaataataattgtgaccccataaacttgaccaaatattcagatgattcaactgatgataacacagccatattacaagaactaattttagaaaatgaacaagacaatttaaacaaagggaaaaaaaaaaataataaaaaatgtaatagtaggacaatatcaaagaaagaacaaagtaaattaaaaaatgaaaaaaataatttatctaaaaaatatgttgaacttatgaaagacgaatataatgaacctaatcaagctaatgaagaagaaccaaaaacatcaacaaaattgaatagtaatataaatggatctatcgaaagtcgaaaggaaaagaacaaatctgttatagttgttaagaataatttatcatatactctttttttatttttatcaaaagaattagatatggaaggtcgatatttattattatcaaacattgttaaccatataagatatccaaattcacatactcattatttttcatgcctcatattatttattttctctcaatcgaatgatataataatacaagagcaaattattagggtcttattagaacgtatattggcacatcgaccccacccttggggattattgataacgtttatagaacttataaaaaatacaaaa

SEQ ID NO: 302 - DNA, 1758 bp, Plasmodium falciparum
atgaaagctacgggtatttctataccccttctttttggtagtttaatgttatataataaaataataaatgataatagtaatttaagtgcacccgaaaaagtgatgggaagatatttatataaacataataataaattattattaagtaatgttttagataatgaaagatcacataatattttttattatattataaataatatatttaataatataagaatgtttataaatttttatttgaatataaaaaaagttaaatctaaagatattttgaaagaatatactatattattttttcattcatataatgtagatagatttttacaatcaagaaatatcaaaacatattcagaaagacttaaagaaatgtacaaacaaattaataaagataataatgtgaatgttatatatataccattagataataaattaatgtttaatattaaacattttagtaacatgaataattggtacagtgttttatttcatgataaagaacatatattaaaattaattaagaaatataatattatgaatatacctactatggttttattagatcgtaatatgaatattattaatgataatattaattatttattattatatgataatcaaggttttccatataaacatattaataattttacatatattaaacatgtttatgataaaaacaataatcaatataacttgaaaaatctaaattcagattatatcttcttctattttaataatagtaaggataacaaacaggatatacagactttgttaaaaattaaaaagaagttagcacaaaaaaatatcaaactcgatattatttttatacgagatatagaaagaaaaattacacaaaatgaaaaaagtgaaaaaaatgaaaagaatgaaaacaatatgttagacacaacaaaccaaaaagatcaagaaggtattagcaaaaataataataaattgaaagttgatgagaaagataaaaacaaactaagaatcaatgataataacaataataataataataataataataataataataataataataagcatggtgtagataataatgatactatgcataacaatcaaaataacaatatgcccatggaagattatctagatgatgtttattatctaggtaatttagaaaacaatgttatatacaaattattattatatgacatatttgatgttacttttaaacctattagtatcttagtcaataaaaaaggaaacttattaaacaaatatattaatgttagtaaaaaggaaaatgaaataaccacatttattttaagtaatcataaaagtttaaatgaaaaagttaatgagaaaaattatttgttcaaatataataatattagtagcatgaataatttaaatgcattttcaccaatatttattttatttagtgataaattagatttagatttattaaaacaatataatgaattaattgaagaatataataaaaatagaaaaggaaaaaaaattaatttctatttcttaccaaaccaggaaaaaaaatatgatcctttaaaaaaattatgttcaattaataatacaaccgaaatagttatattagatttatttaatcaaaaattatacaaagaaaatggaaataatattaatattataaagaaattagagaatggaaaatatattattgataaagaaaaatttttcaattttttaaataaatattatgatgatgaattatatgcttctacgattatcttaacaaaagaatcaacatcttaa

SEQ ID NO: 303 - DNA, 2799 bp, Plasmodium falciparum
aaatgttcacaaggaaacctgtatgtgttacattgtgaagttcaatgtttgaatgggaataacgagataatacataaaagatgtaatgacgacatagaaaagaaatgtaatggtaataataaatgcatatatttttttgaatatgaacttcgaaaaaaaacacaatcctttcgaaataagaatagtatagaaataagtgaatgtgtagaatcggaacagaacgaagtaaaaacatctacgacttgtttattaagtaatagttttattttagatgaagcatttattcaatatttcttttttattaagaataagaatgaggaacctgttatttgtaaagatggtaatataaatattaaaagtgcacttttacattctcccttttgtgaaataaaattaaaagatatatcagaatatattagaaaaaaatgtgataataataaagaatgtttaatagatccattagatgtacagaaaaatttattaaatgaagaagatccatgttatattaataattcgtatgtgtctgttaatgttgtatgtaataaagaagaagaaattggagatgaaagtacagattctagttcaatggaaattcaggattctacatctaatgaacaagatgaaaatgttaaaggaatgagttcatcacaagaaatgaattctaataacgacgaaaataaaaatcaagataatgaaagtgatgatgatgttaataataataataataataataatgatgatcaagatgaacaaggtaatgatggtgatgttacctcttctatgaataaaaatgaagataacaaagatttagaacatggctcttcaaatgatgttaataataatacagacactcttgttaataataaagaaaataaagaatttgtattaaaagaaaaatcaagtttaacatctaaaattaataaagaattagcacatagaaccgctctttttaataaattagctgataatatatccttattattgaataaaaaatatgattccttcgaaattaaagatgtattagaagatagatataatgaaatgaaacgtgatgcaaatccagatgtatattacatttatttaatggatacattagatatagaaaaaatagaagatataaatttagaagaagttaaaatgtcattattagcttccttaaaagaaacaatgaataaaatagatactatagaaaagaaaattgaagaattcaaaaataaatatatttcattatataataaagtaaaaactaccatgccagaacttttcgatttaaatgaagatttagtattattatataatgatttccctttcgataacggtatgatatcatctgatatattctttaaatataatccaagtgaaaatattatggatcatcaggaaatggtaaaaaagggttctataacggaagacgaattaagaattgttaatgaccttgaaccattagataattatagaagaagaaaaagaattacagaattaagaaaaattcttgttgaaaaattaagaatcttatatttagaaaagaataacttatttaatacacaagctagttgtatcaaatcgtattgttacaagaacccattgaatctaaaaacactagaagtattattaaagaaaaattattatagattaaaagaaaataaagattatgatgttgtatcaagtattatacaacatcttgataatgtcgatgcaaacaagaaaaaaaaatggcttacacatgaaagaatacttaaaaaattacaagtacttatagctgaaggatataaaagaataaacgaaaaagaaaaagatatcgatagaagaatggctgtatataatgccctatatgaaaaagcacaatcttataatttacaaaaattatttaatgatagtaatgatttcttaaagaaatatgcaataatgggtaattcttttgatgatggagatgaagtattcggaagccaatcatccaactttaatatttttgatagtaataacactgatcaaaataatgaacaagaacaaccaaaacaagacgatcaattactaaataataataatgatgatgtcctatcagaatccaataacgaaaataaagagaaaacaagcgacgatgcaactcacaaagagacacaagaaaaatcagatcaagaaccttcacaaaatattcaagaagataatagtgatgaaaaacatgcagaaaatgaggaaaatgtagaacaaattgaaacagacagtaacgtttctgaagaagctaatgacgaaaataaagacaatatgcaaacaacaactgatgaaggaactgaagaattacaacaaaatgatgaagatgctgaatctctaacaaaggaaaattcaaaatcggaagaacaagaaaatgaagattcaacagatgctgaagctattgacaaagaagaagtagaaacagaagaaaaaggaaaagatgaacaaaaaaaagacgaacaaaaagaacaagatgaagaagaagatggcgaaaaagaaaataaacataaatcaagtgaaacaaccaacgaaacagtaactgacattgaagaaaataaaaatgaagtaaaaggtgaagaacacctacaaggatcagaacaatcaatagaagcatctgaatcatctcaaaaagatgaaactaaagaaacagaagataaagaagaatatgtaaatgcaaatgatgatgaatctagtgaagaagatacgactccaaatgaaacaaacaaaactgataatggcagttcatttttctttgctatgagtaatgcactcttagtaattttacttttattatttatagaattcctataa

SEQ ID NO: 304 - DNA, 1812 bp, Plasmodium falciparum
catcatatgaataaaaaagtaaaaaaaaaaaataatttttttgttatgatggatgagcatctattagatattatcactcattatattattaaattaaataaggttccgttgtacttacgattcttaccttcatataatataggttccatgacagatattaaaaatgaaattaaaaaattacaattcctaaacgagttctataaaatctatttcgaaaaatataacaaatggaaagtagttattataaataatcgtatacatatatttgataaggaaaaaaacaaaaataaaattaatgcattagataataactctacagaaacaaaaaataatcaagaaaacaaaaaattaacagaagaagaaaaagaattaattcataaaaaaatacaaaaatttaaagaaactaatcaactcagtttcgatccaaaggaaaaggacaaaaaaaaaaaaaataaaaaacataaaaattacaacaaaaacaatacacattatgaaaaatcagaaaacaatacaacagttaacaatacaaataaaggtatttgtgataagatagatgaaaatgaaacaaacacacaaatgaaacatcaggaaaatttttatgactctcaacaggaagaagaccaagacgaggaagacaatgacgaagatgaaggtgaagacgattatgatgatgaagatgatgacgatgaagatgatgaagatgatgacgatgaagatgatgaagatgatgacgatgaagatgaagaagatagttatgatgacgatgaagatgaagaagatagttatgatgaagacgaacaagaagaggatagttatgatcatatcaatgaagcaaatgataaattggtacatcaaaatggtgaatataaccatgccataaaagaaaataactataaaacattacagaatcaagaaattatacataataatgacacaaatcaaaaaaataataaagtatcttctataaataaaattaacacaaataaaatacatgcaaactatttattaggaaaccccgtaaatttgttttggctaggaggccctcttcctggattaaccattttacataatatgaaaaaatattcaaaaaatgtcgtagtgaatgatttgatatatgaagggtataatgaaggcgtaaacgaaagtgtaagtgaaaatataaaccaaaatataaaccaaaatgtgaacgaaagtattaacacgaatgaaaaaataaacatgttaaataatgtaagcatgaacaacagcgtaaatgttttaaataacgtaaatatgaatgataatataaatataatacataataataatgttatgttaaatgataactcaacgaacaatttcacatgctcaactatgtccaacatgaatgaagaacagtacaatatcaaacattgtaatatcataaataataataatttcaatgatgttcataataatatgaacgatggtcataataatatgaacaagggtcataaaaaattgataaaaagatttattggaaaagctacatgggatatgaaccaactcgttgatgaattgaataatgattattggatagcaataaattgtgacaataaagaattattatctaacattatatttaatgcatctaatgaaacagatagtaataatattaataataattttgataattcagcttgtgggaatgtgtcttctaattcttataaaggagaatgtctatgggaaaaaatattggcatctttaaataatgactatgaacagatatcaaaaataccacaaactgttatagataactttttaaaggattttaaaagtatagaaaatgaatga

SEQ ID NO: 305 - DNA, 2367 bp, Plasmodium falciparum
atgaataaacaatcggattcaaagccttatactaaaagtaaaagtaaattccacatgtttttttacaaaaataaatattcgagttcgaaatataacaacaataatgttaatgaaaataatgttaatgaaaattatgttattgaaaataatgttattgaaaataatgttattgacaataatatgaaaggaaacaatgtgaatgatcacaaggtaaatgatcataaggtgaatgatcataatgtgaatgatcataatgtgaatgatcataatgtgaataaccacaacatgaatgatcataatatgaataatgtaacacaagggggacatcatgaaaagggtgatgatataaattctgtaaatttaaacgtgttcccacagaattgtaatagtaatgacaagaataaaaaaaatacaactcttaataatcataataatcatcatctgaatagcagtggtaatgttccttatggtaaaaagaaaaatagtacgaatccacgaagtagtgttatattaaaaaatggagaacataacgtgttgtcgacttataatgaagatatgtataataatataggaaagccgaatgaagagatgaatagtacatgtgatataaatatgaataattataataatgttaatattgatgaggaatataataatgttggtactggttcatataataaatatcacgaccccaataataataataataataataataatagtagtagtagtaatatacatcatagtgttagtcacgtatctaattataaccaacacaatcaaggttataacaaaaatgtagttgtaccttataatgacattggtaataaaaatgaagagaaacataatactaatgaagattattttaactttggtaaagatatggggaatcctagtaataatcaacatgcaatgaataatgtatatcgaaattataagaattataataatgttgatcatacaaatgaaagctatttacatatgtctaaaaatagtaatgttcattacaataattatcagagttattataataatcataatgtacaaaaatatggagaaatccatgataacttacttaattcaaatgatcaagggcaaaagaaaataagtacctattttaactcaacacagggatataacaacaacaacaataataataataataataataataacataagtaatcataataataattattatagtacacatgctaatattactcaatttaatgcagatatgaataatagtaataatcaaaataataccacagctccatgtagtaacgaacacatgtcatcaaataataataataataataataaaaataagaacagcaacatgctagatgacttgtacaatatggaggataacaaaaatgtttataataacggcacaagaaaagattcaattttaaacaatatgataaatcatgctggtgataagaataaaaaacatgaaaataaaattcagaaaagtggggagcaaaacaaaagagatgaaaggaaagaagatacttataagaaatatgaaaaaagagataatatgcccatgaacagcagcagcaacaacaacatcaacatcaacaacatcaacgtcaacaataataataataataattataataataacaagaaagatgataaaagaattgatagcagaggatcacacaacaaaagcaataatagtaattatatgaaaggtatggaaaattgtaatatgaatataaaaaatgtcgacataaaaaatgataatataaaatatgacaatacagatgatgataattataattataataatataaataatactagtaatgatgaaagtgaacatatggatgatgtatgtaatatgaataatatgaaggatataaattgtaagaatttgaattcatccaatggaaatgcatataatatatcttatatgtttatataccaatattattatgtattacatacaaaaaaagagatgatgtacaatttttattcggagaaagctatacttctggttagttttaatgatgaatctaagataataaacacaaaagtacataataatagtgctcacattatgaataatgagaattataatacagataagcaaacacatgtcgatgacataaaaatgataaaaaacaagaacaacaacaataataataacaataataataataataataataatgatgatgatgatgtggataataatacatgtaggaatcaattttttaatttaaacgaaattaatattgaaggttgtcataaaagtgacaatatgataaaattagaatccagaaatatgatttatgaatattataaaaatttagatgtaaatgaatgtacagttcatattatttcaattgaagtt

SEQ ID NO: 306 - DNA, 2697 bp, Plasmodium falciparum
aatatggataatgataataatattatgaataacacattatatccatggaaagaaaataaattcaaaaatgttgatatgttaaatatatacaaaattaataaggatgattatttacatacagatattgttaagaacatagattgtgttataagtccatacaaagatcccaacataattatggataggataaatgatgataataatataaatatggataatttattatttacatataacgaacaaatgaacaatcatcataataataaaaaatggaacgtttttaataattctattattttagaaaagaatgaaaaaattactaatagcaaaaagaaaaataattataagatacatcaaaggcaaaatattaataaaaacgtttcagataataacgaaaatataaataataagaatgtaattagtaaagataaatttaaaattataaattcttatattgattataaattaaattatcataaaaataataaatatagttataataatatggaacataacataaaaaatgtgaatgagcaaagtagtataaataataataataataataataataatatattatatacaacaacaaaagatttaagaaataatattcatacaatcaattttaatgatacaaaaaatataattaatagtgatgattattttgtagatcataattataattataattacaattataattacaattacaattacaattatgcttatgataatatagaattatctaataaaaatatgaaagatgttattaatttatatacatacgttgttaataaaaaaaatgaaaaaaatatttacacgtccactaataatattatatgtaacgatgaatatattaaaaaggaggattgtggtgattgtcagatggtagagagtacgcagatgttcgacgaggaaataaattgttctccggaaaataaaagtaataataataataatattaatagtaataatattaatattaatagtagtagtagtagtaataataacaataataataataattattattataatgattatcatgatgatgataataataataatattatgaatcattcttattataatcatattaacgattcatattactaccaatttaatgaccttcattcaaaagagaatcaacaaaaatacacatacaatataaataacctaatacataatatgaaattattaaatacagaatatgagtctcctctaaattctgaacaagaaaaaacaattttaaaaaatatcgctgtggacagaaataacaacattaatattaataacattacattgcctactcttcaagataaccaaatgaataattataaaaaatatacaaatgatttaggatcggtatcagaaggatacacatctacatataatgatacgttaaaaatgcatagtgaaacatttatggattcgcaaaatggtatgtacattttaccacaatatgtaacacgtgaatgtattaatagtccatatgatagctctctctttacagatgaaaatagggaagagaaaaaagataataaagaacgagaaataataggtaatatgttatatgatgagcacatttgtatggatgatgaagacttattcggaagaagtcacctttttaatatatttaacaatgaagaagaaatagatattaatcaaaaggataattattatgatagggatgatcataatgattatcatagggatgatcataatgattatgatagggatgatcataatgattatgatagggatgatcataataattatcatagggatgatcataataatcatcatagggacgataataataatcatcatagggatgatcataataatcatcatagggacgataataataatcatcatggtgatgatgttatatatgaggaaacgaaaaaaacagataatatagaaatcccgttaaaagacaatgacataatgataaataattcatataacgatagtttaattaattataacaaatattttgttaaagaacatgaatataacaatataaataacaataacaaaatagaagaaaacttaaaaataaaaaatagctatgatacaagttctaaacaaaattataaagaaaataatatgtttcatgatgtggataactttacatctttactactacatataaataattataatgaaaaggattttatgaattttaaaaatgaagattataccttgaacaaagaaatatactttaatgaatgcaaatatgttaaagaaattaaaaatatagatcaggataatacaaaagagttgggaatagttttacaaaatgatgaccaaatatcggaaagcgatatgaggacaaagaaaatgatttattctattttcatcaaagaagaagaaacaaagaaaaataaaaatttagaaaatatatgttatacaaatgaacaggagaaatataataatctatctataattaatcaaaaacaaaatataacaatggatataatcaaaaatgtagatgaattatcctttgataatatggaacaaatgaatattaaaataaatgataatcaaatgtataatgaacaggtgatggataatatggaagatcgaatagaaaagataaacatattaacaaatgataatatacaaaatggtattcacaacaataataataatataattgaagaaaaacaaagtcttaaagataataattag

SEQ ID NO: 307 - DNA, 1887 bp, Plasmodium falciparum
atgaataagaacaacaataaaggtagtgttaaaaaaaacaataattccaagaaaaaaacaagcacaaatataaacaatgtgaacaatttaagtagtataaaaaatataaagaatgaacagaatgtgaaaaacggagatgtaaatgatgaaattgctactactactagtagtaaccatgttaatatggtgttgaatggaaatgatgaagggataaaagatgttaaagttgttaataatttaaatattgataacaaaagagaagataataatgttagaataaatgtacaaggagaagaaactcttaataatgatagtaaaaataaagaggctgaaaataaaagcaatataaagaataataaatcgaaccagtccaaccaatcgaacaagaagacgaagaacaacaacaacaacaaaaataataataataacaataataacaataataataataataataataataataaaaatagtacatcaaataaaaaaaactccaagaacaagaaaaaagttgataaattagacttaatattaaatgaatttaaaaatgatataaaaaatgaaaagggagaaaacaaccaaaacgacaataagttattaaacggcgctatagaaacaaataacaacaataataataataataataatagtggtaataatagaatccattttgataaagaagaaattaaagaaattaaaaagaagataatattaaaagaacatgtgttagaagaacaagataatagctctattcgattgttaaagaattggcctcaactagaaaaaacatatcagacgaatcccccatgtatccctatagatatgatatatggaaaagatgggaaatatccagttggggaaattttagaatataataattataatttaagtggacaatctttagtcgaaaaaaaagaaagagaaaaattaagtattgattattatgaagatttaagaaaagctgctgaatgtcatagacaagttcgaaaacacatgcaagcttttataaaacctggaaagaaaatgattgatatagcacaagaaacagaaaggaaaacaaaagaattaatacttgctgaaaaattaaaatgtggttggggatttcctactggatgttctttaaatcattgtgctgcacactatacaccaaattatggagatgaaactgttttaaagtatgatgatgtttgtaaattagattttggtgttcatgtgaatggttatataattgattgtgcttttacaatagcatttaatgaaaaatatgataatttaataaaagcaacacaagatggtacaaatacaggaattaaagaagctggtatagatgctagaatgtgtgatattggagaagccattcaagaagcaattgaatcttatgaaatcgagttaaatcaaaaaatatatcctattaaagccataagtaatttaagaggacattcaattaataaatatattatacatggtggtaaatgtgtacccatagttagacaaaaagaaaaaaatgaaattatggaagaaggagaattgtttgcaatagaaacttttgcatcaactggtaaaggatatgtaaatcatgaaaatgaatgttcacattatatgagaaatccagaaaaacaatttgtacccataagattaaattcagccaaaactttacttaaagttattaatgataattttgatactctacctttctgtaatagatggctagatgatttaggacaaactagacatttcatggctcttaaaactttaatagatctaaatattgttgaaccatatccacccttatgtgatataaaaaattctttcacatctcaaatggaacacaccatattattaagaccaacctgtaaagaggtactatctcgtggtcccgacttttaa

SEQ ID NO: 308 - DNA, 2982 bp, Plasmodium falciparum
atgagaataataatattagccttgttgatcgtttgtaccataattaattattattgtgctgttcaaaacaatggaaataaaagtttgaatgtaatgcctacttgtagtatgcctggaaatgatagtgatagtaatgataatgagacaggtgatgtagataatgataagaataatgaattaggaaatgcaaatgataataatgaaatgaataatgaaaacgcggaatcaaaaaatatgcaaggagagaattcaaataatcaagaacaattaaatgaaaatgtacatgctaatgatgatgccatgtatgaagggacaccttcaagcgataatcctccacaagaaaatgttgatgcaaataataatgagcaagaatatggtcccccacaagaagaaccagtatctgaaaataatgtagagaatgtagaagttgcaacagatgatagtggtaatgataatattaataataatgataattttaataataatgataattataatgataatgataattttaatgaagaaccaccttctgatgatggaaataaaaatgaagatgaactcactgaaggaaaccaatctgatgacaaacctatgaacgaagaagaagctactattaatgaaatgggaaagataactaacccttttgaagatatgttaaagggaaaagttgacgatatggatattggaaaaatgatgaataaagataatttacaatcatttttaagttcattaacaggaaacaaagatggtagtggaaaaaatccacttagtgatatgatgaatatttttggtgtaccacaaacaggaaaagaaggtgcagaaggaggagtaaataaagaaaaccaaatgaaacaaattaatgaattaaaagacaaattagaaacaatgttaaaaggtgctggtgtaaatgtagacaaaattaaagatagtattaaaaataatgatttattaaaaaataaacaattattaaaagaagctatttcaaaattgacgttagacccttcaatgatgaatatgttaaataataaagatggagctaatggaaaaccgttcgatataaatccagatagcatgatgaaaatgtttaatgcactttctaatgaaaatggaaatcttgatgacttaaaaatgaaaccaactgatggatcttttgattcatttaatgatggtgttgataataatttagttccttcgaatcctaaaggacaaaataataatgaagaggacgacgaagaaggaggtgatgatgatgattatgatgataaatcattcgttgtaaattctaaatatgctgataattcctttgaagataaatttaatacttttgatgaaaaggatgatgatgttaaatatgaattatttggtgaaaatgaagaagcagaagaacttaataataatacaactactgcttcatccaagggcgatgcaaacaatagtgtaaacacacaagaaggagaaggagaagaagaatctttttcagcaaatgaagaaaatataaataataataacaatcataataataagaactataataattataatactagccaacaagaagaggatgataacagttttaatgaaaacgatgaaccattaatatcgtcatcacaatttgataataataagaaaaataaaatgtcagtttctactcataacaaaaaatccaaaaatcttatggattctttagatttagaaagtactaactatggatcaaattcttcatcatccatgagcaacaattataacagtaaaaataaaaatagcaagaaaaataataaaaaaaaatcatcacagaaagattatataagaacagatggtaaagtttcatttgatatggctacattgcagaagacaataaaaaattttggtggtgcagataatgaaatcgtacaaaatatattaaagaaatatgtaaccatagataatgatgatgacaacgatgcagacgaagatgaagatgaggacgacgatgatgatgatgatttggatgaagatgaatttagtgttaaagatattaaaaaattaatcgaagaaggtattttagattatgaagatttaacagaaaatgaattaagaaaattagctaaacctgatgataatttctacgaattatcaccatatgcaagtgatgaaaaagatttgtcattaaatgaaacttcaggattaaccaatgaacaattgaaaaacttcttaggacaaaatggtacatatcatatgagttatgattccaaatctattgattatgctaaacaaaagaaatcagaaaagaaagaggatcaacaagaagatgatgatggattctatgatgcctataaacaaattaaaaattcttatgatggtattccaaataactttaaccatgaggccccacaacttatcggtaacaattatgtattcacatctatatatgacactaaagaaaatctaataaaattcttaaagaaaaatagtgaatacgatttatatgatgatgatgataaagaaggtggaaactttaaatctcctttatatgacaaatatggaggaaagttacaaaaattcaaaagacaaagagcttttaatatacttaaacaatggagagctaaagaaaaaaaattaaaagaaaagaaaaagaaagaagaaatggaagaaaataaagaattcgacttttctaaaaattataatttttcatctaaaaatgatggaggtgttactatgttttcaaaagaccaacttgaagatatggtaaaaaattttggaggaaaaccaagtgctcatgtaactgattctttttcacgtaaagaaaatccatttgtcccaactaatacaaagaataattcaaatgatgatgatgatatggataatggatatgttacctttgatggaaaaaataaggtctcagaaaatgatgacgatgaaaaaggaaataacaatgatgatgaaaatgataacgatgattctaatgatgaagaagaattggacgaagaagaggacgacaattaa

SEQ ID NO: 309 - DNA, 1008 bp, Plasmodium falciparum
atgcttggagtgcttaagtgcgctttcaatgcaggagtaaaagtgaaaagtgcagcggaggttggaaagagagcagtagaatattttagaggtgacgattttgtaaattttttaagtactaatggtgaaatgttaaaaaagaaatttcctaatttatttataaatagaaatttatcagatatgaaagaaattgaagaatttgctgacatgttcatacaaaaaggatatatttataaagctcaatataaaccaataaaaggaataaatgaaaaagatgaaaatggtgtttataaaagacctaaatggccaaaacgattaattatgacttcaaaacaaaattttgataaaacaagtttttatatattagtacatgaaagaaataaaaaattacaatattttatgttaataagtttaataagtatagttttaatttgttgtatgtttccagtttggccactcagattaaaattagctttatggcatatttcagtagcattcttaacattaatatcaataatcatagtaggaagattagttgcttttattttcttctggttttttggtgtagattattggatattcccaaatttatttgatgaagaatgtaatgtagtagaatcatttttgccattacaatcatgggtttatagaaatgacacatggtttttatttgtagcaagaatgtgtacagctgttttgttagccatagccatacaacaattgggtaaaactcattccattgcagatatacgtaattttgctacacaatcatatattgatattattgagtggggtaataagaaattagctgcttctcctgaaaatgtttcaatgtataaatctatagattcaaaagcaacctttgaaggaaacgtagatgacgatgataccgtttatgatgaaaatgaagaaaattatgattgtttaaaaaaatgtggatttacaagttttgaagaattagttagaaaatgtttcttaaagtgtgaatgcatggaggtaattatatga

SEQ ID NO: 310 - DNA, 501 bp, Plasmodium falciparum
atgaaacttttaagagtaacacctgaaaaaaatatagaatttcctcttgttcattttcaagcagtaactcaagttgttaaattagaaaatgtaagtgataaaaaagtagcttttaaaataaaaacaaccgctcctaataattatttagtaagaccatcatttggtttaataagtgtaagagaaacaatagaaatacaaattatattacaacccttgtcagacaaagataatatatcaaacgataaatttcaggtacaatgtttaaatgttgatgataatactacagtagataaacaattttggataacagttaataaaaatgaaatacaagatcataaacttattgtagttctaaacgatgaaaataatagtaaattaaatcattcttacataccctcaaataatgtacctctctcagaaatgaataacaaaaatatacacaatatgggatacgtcgataataataatataaatcaagatgacccaaatttagcagatggt

SEQ ID NO: 311 - DNA, 1521 bp, Plasmodium falciparum
atgggagataataacacatccagcggtagtagtcccgttttgtcagtaggtaatattcgaggttttggtggaagtgactttgggtcttttaggatgtcgaatgaatttttgggttggaaaaataaaaagacaaataatgtatatcagtataagtgtagtgatattgatgaaggttgttggattaaaactagctataataataatagattacatttaaaattaggtgaatcaaaagagaatattataatatattttgatggatttccagatagaaatgtgaatgaaataacgcaacatttccaaaaatattttaatataagattaaataatagaaagatagcaacgaaaggatggaactggggagaatttaaattagaaaattctaatttgtgttttgatatagataataaatatgcttttaatttacctacgaataatattaatcagttaaatgtacaaattaaaacagatattgctatggaatttaaaaatgatgaaaataataataaaggtaatgaagatttcttagctgaaatacgtttttattatccacatgaaaatgatgaaaatcaaaacttccagaatttaaaaaatgatttattagaaaaagtaaatataggagataccaaaagtgaaagtattgcttctctatctaatatacctctattagtaccaagaggtagatatgatattgaaatgtattccagcacatttaaattacatggaaaatcttatgattttaatatacaatatactaatattaataaaatgattttagtaccaaaaagtaattctaatcaatatgttttaatattcagtttaagtaataaaatgaaacaaggacaaactgaatatccttttattttaatacaattaaataatgatgatgatatggaattagatataagtgctagtgacgaagttatgacaaaatataaacttgaaaaaactatttcaggaaaagctcatgatgttgtaaccaaactttttactgccttagttaataaaaatgttattgttccaggagattatcgaacttctaaaaaccagcatggtattacttgcagttatagagctgcaagtggtcaactttatccattaaataaatatttcctatttattgtgaaaccggttattcttatttcttttgatgatattgtaacactcagtttccagagaacaggaaatattaatcaacaccgtttcttttctcttattattaaacacaaaagaggaatgagctatgaatacactaatattgataaaagcgagtataatccattacttacctttttgaaaagcaaaaatattaatatacaagatgatgccaatgatttggagaaaaaacaagatttccataatgaattggatgaatccgatgaagaagaatatgttgcagatgatgacgacgatgaagaggattatgttgctgaggaggaagacgaagatgatgatggcgatgatgacgatgatgatgaggaggaagaagaagaagaagaggaagaagatgatgataaatag

SEQ ID NO: 312 - DNA, 2580 bp, Plasmodium falciparum
ttgaaaaaaaaaaaacattatcttaatgaattatattccttaaatttcttatcatcatcaactaaggataatagatttgttactttttgtgcactcttattatttgaacatttcagagaatatgttaaagtaaaatatattaaaaaaaagaaacatataatgagaaagaaaaaaagaagaaaggaaatattaaaaaaatcagcaactatatttaatacacttaagggtaaatctattgatgaattaattaaaatgagaattatacaaacacaagaaacatataataatatcgatacaaataatgctatcatcgattcagaagctatgcacaaagatgatgatataattgaatactcaagttcattatatgaaaatagatcatttcttactagtgaaaatgctgctgaaaggggttcgagtattaagagtaattcttataatcctgatacgcatgataataaaatgcaaatgaataatagtaacatagatatgaacttgtcaaatattagttataatcatgatgaacttgaaaataataaaagcttaatcaatatccatagtaattttactacggaagagtcatgtgacgacatgaatgaaaatgaaaaggacataaaaaaaaagaagaaacatacaaaaggacatacctctaaaaaagaaggaaaattcggtaaaatggacgaagacgaaatagatgtagaacaagaaaataataatgataattgtaatgatgtagatgtaatgaaacaggaaaataaaatgttaaatggtattgttgatgaaaaaatatcagcaaatgatcaaaaaaaaaataataaaaatagttctaatatacataaaaatatatctgatgatcattcagtcttaaataataactccaaaaattctgttgctcattatgagagaaatgatgaaggcaaaaaaatagacaaaaaagataatactgaaaataatattattaataatattgatgatgataatattcacaacaactacacaaatgaagaaatatctaaaaaggagagtgatttacataaaatagataatcatcataaaaaaaaaaagcatcatcatcatatgaaagcaagtgaaattatttcatccgttgctcataatttttcgaaaaagcattttaaacatagtactaaaaataatttaatggaagatgaatattttgtaaaatcaatggctaaatttgtaagatataatccatttttagataaagaatttgtaggtgaatatatttcacataggaaaaatgtaaacctattaaaacgttatgtaagattgtttgatttttgtaatttatcgttattatcatctttaagattatttttacgttgttttaaattacctggggaagctcaattaatagagagaatattagaacactttagtttatgtttcttttattctaatccaatacatggtgatttaagtaacatatataaagtagaaaatgataaggtggtttgtttggtaaatgacgaagaactagctaataaaaagaggtacatattaatagattttttaaatgaaaatagtaataaaaataatgtaacgcatgatgatagtgtattaccaaatggtaatgaaacggacgcgaaaaaaaatgtggatgagaataataatgaaaatgattctaatttaaatgaaaatagtacaaatctgaaaaaaaataatgtagataataataaagataatgtgaatgatttacatattgaagaaaaaattaatttaaaaaagaatgtagatattaatgattatatgcataaaaatgtatattacttatcaaaaaaaattgaaagtatgagtgaagaggaaattcaaaagaagtatgtacttgttgaaaatagtgatgttatttttatattgacatattctataatcatgttgaatacagatttacataataatcaagttaagaataaaatgaaattagaagaatttattaaaaataatagaggaataaataatggaaaaaatattgatagaatatatttagaaaatctatataattgtattttaaatgaagaaatcaaattattttcaaatacacaaaacacatatacaaatgacgatcagtattggaaattattagatcaaaaaaaagaagaatataaatattatcattattttaaagctaatgaaatatatttttatagatatgatataaacaaattgttaataagaaataatttcctacctatattttttgaactctttaaacgaacgaatgattacaatttaatcgaaaactgtacatttatgtttaaaatggttataaataatttggcatattatcatgatttaggaaatataaataaaatatgttatatatttaaatatataaatttttatttaacacaaaaatgtcaatctttattatatttatttttccatttcataaaaaaatgttataattcgtttcgaaactgttggtctatttatattaatattatatttaaattagttactattgatttattgcctatctttttttatccacatatatttataaacaatactcagtttaacattgataaagatgttttaaatagaaagtctaagaaaggaaat

SEQ ID NO: 313 - DNA, 1779 bp, Plasmodium falciparum
gataatgattctgaagatataaaaaatacaaactttaatgtaaaccataaagtaatacaaaaaagctttattaataaacaagaattatctgatgaaaatatcgttaaaaatgaattatacggaaatgaagatttgtatgattatgaaactgacgaatattatgttaatgaaaataatgataataacgatttgagtgataatcaatctagtcaaagtgatttttatgaggaaaagtttccagaagatatggtaaatataaatgatgaaaaaataaaaaatgagctatgtacatatagtttaaacaattcaaataaattccttcattccaattctaattacgtaagtagaaaaaaggaggatgatttacaaattaaaaaaaataaaattataaaaatatatccgaaatatcaaaagttatataatgatacggatacacctatttctatattaataaatccgcagtttgcatcattttttaaaattgaattatttttatttataaaaggatattcaaaagaagaaaaggttgttatatatttgaaaagtataacaccagaaatatatatatcaaacagcatacatgatatagatacaattcttataaatacttgtaaaaccttacattttgatcttagcaataatcatccaattgatgcctctattaccatagaaaattcagatgattactataaggaatataagatagaaactaaaaaatttattatacctgcaaattctaagtatttacttattattgtatatttacctacaagacatggtccttttgaaaagacatttataattcatcaaaaatatacaaatgttaaaaaaaatataaaacttttaggtacttgtatacttccagatcttaaatttgatatagatgaaataaattttaatgaagtatcacatagttttttatatgaaaaaagttttcatattattaataattctcacttaactttaaattattcatttaaatattctaatgaattaaatgaagaaattcaaattataaaaccatttggtgaattacaaaaatatgaaaaagaacaagttgttataaaattttgtcctaaatatataaaaacatatttttataatatagaattttttatagaggaaattaaaacatataaaattaagttaccattccatgctatttgttctaaacctttagttttgtgtgaacctctttttttaaaccttgaacatattattattgatcaaatatatacagaaaaaataaaaataattaatgaatcacaagaaactgatataaaatatgaattcataatagaagaaaaaataaaagatatttgttctttccaagtttgtgagaatgaaggaataatacaaagaaattcttttaaatctattggtatatctttaaaaagtaatagtataggaaatatattaattgttataaaaattaaaattcctggtttggatgatttcttattttttaatataaaagctttttgtacttgtccatatataaaaataattccaaacattatcgattttgaaaaatgcaactgtttagatgttaaacaaaagattattgaaataaaaaatgaaagtcctattagtacatttattactttgtctaatgaaaattcggtgtttacatattctgataataatttctacgtacagccaaataagtctatttttataaatgtatatgcacaatgcttagaaacaataacatataatgatatattaattgtgactgttcatcgaaaggatgacatacatataccaataagggctcag

SEQ ID NO: 314 - DNA, 2325 bp, Plasmodium falciparum
ggtataggatcaccaatatttatccatgaggaagtcattaattttgatatagttaacacgagcaaaaaatatttccacgaactaatcatttttaataaaggtatgaacgaaagaaatatatattttgtatttgaatcagaaaaaaatagaaagagaaaaagtgaacaagtacaaatatttaacatcacaccaaaaaatttgtcaattaaaggaggaagtaatattgtgtgtattttaaattgttttaatattaaggaagaaaaatgtgaagatatactttatatatatgatgatattgcaaaaaacaaaaaaaaagcattacataattataaaaaaataaatatcgtagctacatttgttcatccggaggttgagttaagtgaagtggaaaattttgtttataattttaatgattatcatgatatagatgaaataggaagaattgaaaaaagatataaaaaggatattaataaaaagaaaaaatatataaacgacaaaataaatgaaaatgtgaacgacaaaatagatgaaaatgtgaacgacaaaataaatgaaaatgtgaacgacaaaatagatgaaaatgtcaacgacaaaataaatgaaaatgtgaacgacaaaatagatgaaaatgtcaacgacaaaataaatgaaaatgtcaacgacaaaataaatgaaaatatgtacgacaaaataaatgaaaatatgtacgacaaaataaataatgatatatataatttgaataacaaaaattctcaacaaaaaaaaatgattcttataaaagataaaaaacaattaatgcaagaggttgaaattcgaaatttaaaaaatgctaatattaaatttgctttgtctattaaagatccatttttcgtacaatctgatataatagaattgaagggtaaggagaaaaagaaagtaccgatatattttgacataaattatatgaataataaattaaatactacatatcaagaaaatttgataataaattattttgaaaacagtagaagacaaaagtatgaattagtaggacaaactatataccctaatattattatgaacaaaagttgtatagattttcaatatattttacaaaacttatatgctcaagaatttgtcgaaataacgaatgtatgtgattataaaatatattttaaatggttttttgaagataatagtttgtataaagattttaatgaagtttttgatataaaccctaatagaggttatttattaccacatgaaaaaaaaataataaaaataacatataatagtattaatgaaaattattataatattactatattatgtcaaataaaaaatggacctatgtatccattaaaaataattgctggttattcagaaataaaatatagtataaataaaaagatacttgaatataatatacattataaaacaataggagaagatattataacattacaaaatattgggaaaataaaattatttattgaaattatttataatataaaatttccatctttattatatacaaatatcaataatttctttattgaaccaaacaatagtagagacatcattttttattttattccaggaatccctatagatataatagacaatatattaattaaaatttgtaattttgaagaaataaaaataaaattgaaatcaacgaattcatgtaatattttatatttaaacataaaccaatttgataatcatcaatcaattataaaagatgaaatttatttattacaagatgttgataatatgcaggatttggatacaacgtttcattctaagatgaaaaatgattctataaataaaaagaataactttaaaaacataaacaatttattaaaaaataatttccatttatatgataatgtgcaaaatgattattatgaaaaggaaaggagctgtctaattaaaaaattgaaaaacatgtattcagatattttttcatcattaagaaagtatatccaagaaatattagatatatattacagtataattagaaataataaaaatagtgatgatcataatgatgatcataatgatgatgataaggacaaaatggaagatataaatcttatgaataaaaaagacaatacaaaaaatgaaaaaatgtttataagaagtagtattatacatactaatgaaaaggattcaaagaataatatgaaatgtaaatatcacttgatacctattttaaaaaattacactttaaaaaacaattcaaattgtgctatatttcttgatttgttaaaagctttaattttgaatcacaaggatgataattatattctggaactattcacaaagcttaaaaaattaatc

SEQ ID NO: 315 - DNA, 939 bp, Plasmodium falciparum
caaatgaacaagagacctaggattggaaatatgaacgacatgaaaagtggtaatataaattcgaccattgagttaaataaattaataaaagattattctgagaaaaaaatgttaaatcagttacctaacgacaatacaacaaatgaagctgaacaaattatacaaacattattaaataatatgatgaataataaaccagcaaggataaaattatatttatgtgatcatttaagaacatgtgcaaaacatgtatttaataggccttcaatatatataagtaataataacggaatggaaaatagtacaaatcaaaatatgtatcaaaataataataataataataataatagtaatggtgaatcattattatataattcatcagataaaataaataataatgatatatcattaaataatcaagatattttttctcttcctcaagaaaaaagtatacataataataaacctaatgtatcaacaaataacaatgaatatatttggaaaggtatcttaagtatgaagaataaagaaaatttgaatattattgggcatgcattacaaggaaatgtaaacatttttttaaatgctcacattacaaatattgtaataagtcataggaaaaggatgaaaagtatacctcaaatggaagctatatattattttgaaatcgaaaataaacaagatgaaaatatttttgattcttataaaaattattttaatacgaaagatagagttggattagtatcaacaaatgaaaattggcatttatatataatatttccaggaagtccgatatttaatcaattctgtaataataataatttagataatatatttataggtattgtatgttataatcctcaaatcgtagacaagagaagtgctttatcttttgcgggacaaaatatggatgcatcaaacaattataaccaaggagat

SEQ ID NO: 316 - DNA, 1023 bp, Plasmodium falciparum
atgagaggatttaattacaacaacaatagtaataataataatagatatagtgcttaccccgattataataatagttatggaaactaccaagcatatggtcaacaatatagagcgaattatggaacagggtatgttccaaattacaataataattctaataattatggtaaaaatttagctccaattgattggaaaactataaatttagttccgtttgaaaagaatttttataaagaacatgaagatataagtaaattatcaacaaaagaagttaaagaaattagagataaacataaaattacaatattagaaggtgagaatgtacccaaacctgtcgtgtcaattaataaaataggatttccagattatgttataaaatccttaaaaaataataatattgtagctccaacacccatacaaatacaaggatggcctattgcattatcaggaaaagatatgataggtaaagcagaaacaggtagtgggaaaacattagcttttatattacctgcatttgttcatattttagctcaaccaaatttaaaatatggagatggacctatagttctagtattagcaccaacaagagaattagctgaacaaatacgtcaagaatgtatcaaattttctaccgaatcgaaaataagaaatacttgtgcatatggaggagtaccaaaaagtgggcaaatatatgctttaaaacaaggtgtacatattttaattgcatgcccaggtcgtctaatagatttattagaacaaaatgttacaaaccttatgagagttacttatcttgttttagatgaagctgataaaatgttagatatgggatttgaattacaaataagaaaaattgttgatcaaattagacctgatagacaaactttaatgtggtcagctacatggccaaaagaagtacaagccttggcaaaagacttatgtaaagagcaaccaatacaagtaaatgttggctctttaacattaactgcatgccgtagtattaaacaagaaatatatcttcttgag

SEQ ID NO: 317 - DNA, 3009 bp, Plasmodium falciparum
atggctgatgaaaccaaaatagggaaagaagaattaagggtgtggatagaggatacattgaaaagaaaagatttttcctttaattgtttgaaagacggtgatatatatttacaactgtttgaatatatatggccaaaagtgatgaaaaaatataaaggacgtattataatgtatccatcaagtgataatgaaagaaaagaaaattggaaagtaataaatattgtattgaagaaggtacaacttgaagaagattttattaagtataatgatattgttaaaaataattttaaaccatgttatgaatcattaattattttatattttttatattctttagtgagatatcatgaatgtgattttatattagcacatccgattgatcaaaaattaactgattttatgtctagtgagaaacctctaacatgcttggttaaagcaggtagtgttaatctcccaaaaaatgtatttgaaaattttgggaatatgtctcaatgggaagatctacatgtaatagatgatgacaagggggaaaatgatgacaggggaaaaaatgatgacgggggaaaaaatgatgacaaggaaaaaaatgatgacaaggaaaaaaattatgacaagggaaaaaatgatgacaaggaaaaaaattataacaagggaaaaaatgatgacaaggaaaaaaatgatgacaaggaaaaaaatgatgacaaggaaaaaaatgatgacatatataatgaaatgtataaccaattcaataatatattaagtacttctcataaaaaattagatatgcaaaataacgtatcttttaaaaaagatgatataaaaaaggatagttcaatggaacacttaaatttgatctatcctataaattctcatatggaaaatacctttgataaatatataaaaaattgtgaaacctatacaattgatcataacaaagaagaacaacaaaatatgatggaccccattgattcaaatagtaacatcaaaatggaggaagtatcaaaggaatacaagaaaaaaaaaatttttttagaaatgaataaggaaaatagtgaagaattagatactagagtaaatagaaattatacaaaggaagaaataaaatatgataaaaaatatgatcaaagtgatactgttgtaggatatgaaaaatgtgtaaatgatgataccatatcttataataaacattttagtgataatatattgagtgaagttacttggaatcgtttttcttccaacatttcttgttatgatgataataaattatataacaaaggtttgcataataatatgtccaatatatataatgataatatggatataaaaacaaagaattcaaaggaatttcatataaatgggataaagagaaagagtgtatcgcacaatttaagtaatatatgcacttctccttgtagtgaattttttaaatattttagattggacgacgagatatttcaagacaataaaacgaaaaataatgtagatatgataaatagtaaggaggatctattaaaaaatgatttgggtttatataagaaagaaaaatataatatgtgcacatataaatataacagcaacaacaacaacaacaacaacaacaaaaacaacaacaacaacaacaacaacaaaaacaacaacaacaacaaaaacaacaacaacaacaataataataataatgattgttttggaagaaggcctatccatttctttaaacacctcaataaacataaggtagatgtgccatcacaaacagataataatctagaggatatatttttaaacaatataattcatcatgagaatataaaaaatctagaaattatatggaataataatgaacaaaagttgaagggggaatctttaattcttttcttaaaaaatcaaataaaaatgtataaaaaagaattaagtatcaaaaatgatgaaataaaaagtatacaaaatatacacaaaaaaaatatagatgatataatatcatctcatatattagaaatatccaaacttaaggaaaaacaccaagcagatatttttttcataaaaaatcagcacttggaaaatatagtaagtgtaagaaaaaattttgaatcaaaattaaatcatatagaggaagatcttttcttagatttggatatactttataacgaagataatggttatgtaataaatgaacaaattaatcaaataattataggagaacaaaatgaaagagaaaaatatggaacagacgaacacattgataattttctcaataataaggagatcaaaaaatgtgatatgaataataatgtgaacaattctaatgatcatataaataataataataataataataataatgatgatgataaaataaataataataataatgatgatgataatataaataataataataataatgatgataatataaataataataataataataattattgttattattataataatactttaaaatgttcagagagagctaataacataagggatgttaattatttagaaataaaagataacaataatcttatgatatatgaaaaggataagataaaggaacacacaccaaataatgatatactatataataatatttcaaatgaatttattagaaataaggatataccctttaaacatgaagaacataatttgagaaacaatattattattccacatggattagatgataatccacttaagaagctgaaatttttgtggagttacaaaaataaagaacatgaagataacaataaatatataaaagaagaaatgactcaccttaagaaaatatataaccaagtattcttagaaaaaactaaagaatacgttgaactatatgttaacaataaaatattttatgatatattacaatatattgaaaaggacaataatgttgttaaagaagatatattgaaaaaaaataatgaacattattatggtatagaagaaattaagaaaagaatatatgatattatattaaaaaataataatgaaagtaatacatatatg

SEQ ID NO: 318 - DNA, 2763 bp, Plasmodium falciparum
atgaataattatactcctgcagaaaatatttattataataattcaacagaaccatatattaataataatgatatagcttgtaacgataatatgaattatgataataacacgttcgatctttttaattatgaatatacctcttttgataatacctataattcttatcaaaatgaagattattatatggatgacaacacggatattattttttattcgaaagatacagccaagtattatatggacacattaagtaataagcaaaatgatgacgtaggaaaggatgaacaaatattaaatgataacaaaatgttaaatgaaaataaaatattaaatgaaaacaaaatgttaaatgaaaataaaatattaaatgaaaacaaaatgttaaatgaaaacaaaatgttaaatgaaaataaaatattaaatgaaaacaaaatgttaaatgaaaacaaaatgttaaatgaaaacaaaatattaaatgaaaacaaaatgttaaatgaaaacaaaatgttaaatgaaaataaaatattaaatgagaacaaaatattaaatgagaacaaaatattaaatgagaacaaaatattaaatgagaacaaaatattaaatgaaaataaaatattaaatgagaacaaaatattaaatgagaacaaaatattaaatgagaacaaaatattaaatgaaaacgacgttacaaataaaaaccaaagtaatgaagaaaacaatttattaatagaacaagataatgaacaaatttgtaaaaacgaaaagaatagcaatcatataaatgttatacaatttgaagaaaacaaagaatataacaaggaagatgttaaagaaaagttacatgaaaatgaatcatttcataatgaggatgaaacatatacatccagtatctgtgaagaaatgccatcagatttaaatccttataatgaaagacaagaatatgaagaagaaattactaatgataattataaaaatattttatccaatgtatttctacacagaaataagaaaaaaatgatattcgaaaaatatgatgatattagaatattagataatatatcttggaccatcttgttgaagaaatatatttttatcattctatataccatgaaacattgtatcgtatttaatgataaggaagaaaagaaggctgataataaattgggagttgacaaaggtgatctcattaataaatgtaatattatggataaatgtgaacccgttgatgtgtatgataaaaaacgtgaaaacattaagaatgatattgaatgtgttgttacaaaaaatgatgaaaatattacattaagtgatgatattataaagaatgaagaaaatacacataaaaatctgttacataataatttaaatcctaaagatgtaataaataataatatagagaaagaagaagtattatatgatacatttataaaaacaaatgataatactgaaatagtagatgatagattatctttttttaatgataacctagatgtagaagatgacaaatattatcatttcaatatgtctcattgtttaaatggtgaaaaaaataagaaaaatgtttttaacaatttaaattctttatatagtataaatttagataacataaatttagatagtataaatttaaaaaagtataaattaatgtggttacttaatgtgaataaaacctatttaaattataatgaaattattgatctaattcatatttggaatttcttatgtaaagaaaataatacttatgaaatgttaaatgaaacagataaaatgaaaataataatgttctttataaatataatacgagatagtaatatatgtaatgaatttgtaaaaaaaaatattgatactaataaaacatttttaaatctcgatcaattaaataattcagtgaatcatgtattaattaatgaaaagaatgattctaatatgtgtgcaactaataaagaaatcgatacaaataaattattattagttaaatatgaaatgaagaatctttttacaaaaggagaggaagccaatattgtatctaatgtaaataataataaaggaattaataattatgaacctgtcagtataaatcaaaaagagtgtgaaaagatatatatgccgatggaatcgagcttattaaaagaaacaagtgaccatacaaattataaaaatggtggaaatgttaagagtgatagtaataataataataataataataataatagtagtagttgtagtaataataatatttgtattatgcaaaatgaatatttagggaatgatagatatgataataaatattattatcttgcggatatttttggttatataaatagaatatatgtgttatataataataataaaaatataataaatgatgaaaataaaaagttacatacagaacataataataataataataataacaattgttgtaatatctctgtggagataatgaattcttttgtgttttgtcctattcatcaaaacgcaaatacaacaaagctttccaaatataatataaatattggttatattgaaggaatacaaaatattgatctttttattaacaactttgacacatccatatataatgagacaaatttaaaaaaaaaatttatccaaataaaagaaattatacataacgaacaatttaaagttttaaagaagaattttaaaaaagaaaaatgtaatattaaaaaaaaagtcaacgacaaaaattataattgtaatgatttagaaggtaccataaaagatatagatgatgaggaaagt

SEQ ID NO: 319 - DNA, 2229 bp, Plasmodium falciparum
atgttaaaatttttcatattcattttacacatatatttatacatcgattcaatatattcatcagaactaagcaaacatgtaaaacatgatacagatgaattaaaatatgctagtccaacttatgatcccaagaaaggtaccaaggttattttttatatgccaggaaatgagcaaggcgttataccgaataatatacaaaataaacaacatggaacctcaatatatcctgctattgaatatcctactactaaatatcctgctattgaatatcctggtagtgaaatgaataatgggaaaacaggaactactaattcaggaatatataataaagcccatggatcttctaatgattataatgcaagtaattctcaagataaaaccataaatttacatatagatgaaaataattcaaataattcatatcaaccatatgattcaaataatactaataataatactaatagtaataataatagtaataataatagtaataataatagtaataataatagtaataattatagtaataataatagtaatactaatagtaatactaatagtaatactaatagtaataataatactactaattatgatttaaacagtgaatatgaaaaaattagaagaaaagaagaagaagctgcaagaagaatagaaagagaaagaagagcagatataaatagaaaaaatcaagataataattctaacaaatataataatgaacaaaatggaggatatgaatctgatggaaattcacccaatagtagagtaaatataaatataacaaataatggaacacatggtaatccgcataataataattcttatggtcacaaaaataatatgcataatacaactaatggtaattatgctaatggtaattatgctaatggtaattatagtaaaggtgattatactaatggtgattatactaatggtgattataccaacggagattatactaatggtataaataataatatgcatggtaagaataattataatacagctaatggtgaatatgttaatggagcttatgatgggttgaataatggatcatataaattaattggtaatttaaataataaccaaaatgtagataattcttataatcaaggtaatgaaaatgataaaacatacacatccaattacaatataaatcttgaagataataaaaattctccagataataaccaaaattatatatcaacatttaacaaagatataggtccaaataaatctgaaagatcatattatgatgtgtatggaagagaatatgatgataacaaatataatccatataataaaacaaataatcataacacaaatcaaaatggatcgacaacgtatgggtccaatgccaatggaacatacgggcctaatggaacatatggatctaatggaacatacgagcctaatgaatcatatggacctaatggagcatatggacctaatggaacatatggacacaatggaaagtatgggtctaagggaacatacggaaataatgaaactccttattatgtggaacatccagaatatgataatggaaaatctatgtccgattttcatgtaaaagattccaaggataatattggacctgggggagattaccctaatttgtatcaaaacatatatggaaatgaaaaaaatccaaatatttttccaggaagtcctcgtaatataaatgtatattctgttcaccatataccaaataatggtgcaaatggtggtttaaatagtggtgcaaatggtggtttaaataatggtgcaaatgatggtttaaataatggtgcaaatggtggtttaaataatggtgcaaatggtggtttaaataatggtgcaaatggtggtttaaataatggtatgaacaatggtatgaataatggtatgaataatggtatgaataatggtatgaataatggtatgaataatggtatgaataatggtacaaatggtggtttaaataatggtatgaataatggtatgaataatggtatgaataatggtatgaataatggtatacatgatgacttatataatagtgaaaacagtacttttaataacggtctgaataattcaggaagaactggattaaataatgcatatcctcataatggtatgcttaataatggaaccgaatataatgtacattatggaaacagtgattctaataatacgaatgacagtatgctaaatgaaaactattatagtgatagtgactatgat

SEQ ID NO: 320 - DNA, 2229 bp, Plasmodium falciparum
aatacgaatgacagtatgctaaatgaaaactattatagtgatagtgactatgatgatcacaccccagggaacaaaaagaaagtatataaaagtgtagctgaaaggaataaaaaatctgcttctcaagatagtttaggagcaggatttagtgatagtgatagcgatagtgaatacgaagtagtagatggggaaaataaaaaatacaaaaagaagaataaggaaaataatgaaaaagataaatatgaaaataattgggattccaataattataattctgataatgaaattaaagatggttatttaagtgaatctgaaagagaatatgcaagaaataaagcgaatgaaattgaagataaaatgaagaaaggagaatattctcgaaagtataaaaatagtaaatcgaatgaatccggatatgcttcaaaacaaacatccgattcagatgattctgatattgaagcaaatgcattttatgtagataatggacaagaaatgttaataaaagaaaaagaacattattcaagtgattcagaacatcataaggaagaatctgcttctattggaaatttaaatgtattttttcctgctgaaaattatcatttttcaacgtatatgggatttgatagaagatcgtttttaccctctaatgaaattgaattagaaaaaatgattggagcgaacttttcaaatgaagttaaaaattattgtagccgtcaaaatgttgcacaaaaaataggagactatctgaatatatcatttgaatattctagagcattagaagaattaagatctgaaatgatcctagattttaataaacgtaaacatttaacaaataatactgatgacacaattttacacatgatagaaaatgcagagaaaagaaaaaatgatcctaattataaagaagcgtatgaaaataaagattatgcaaataatgctaatatctttatgaatgaatatagtaatccattaagtacaaaatataataaaatattaaaagaatatctttgtcatttatttgttaataatccaggtactaaaccattagagagattatattataatagtttagcattaggagaacttgttgaaccaataagaaataaatttaaaagtttagcatcatccacaattgattttaattatgaaattcatatggcttcggcatctaatatatatttacttgcacatttcttagtattatccttggcatatctttcatataatgaatattttacgacaggaaccaaatcattttattcattaccaaccatacttacagctaattctgataatagttttttcatgttaaatgaaatgtgtaatattcattataatcccaataaaaatttcaaaaaagatataacgtttatacctattgaatcaaggcctaaaagaactacaacattttatggtgagagaagattaacatgtgatttattggaattagtattaaatgctattatgttaattaatattaatgaaataaacaatgtattttctaataataatgtagatggatatgaaaattccttatctttttcacataatgctattagaatattttcgaaagtatgtcctaaaattaataatgacaatgtattaaaatgtgaatttgaagaatcaagtttatataatcctaaaattattaagaatgatacatcagaaaaatcgagtcaaaaaaatttaaaaaaagcatttgatttattaagaacttatgctgaaatagaaggccattcagctgaaggtagcacaagtccatattatgtaagtctaatattagatgatatgaaatataatgatttttataaatatacactttggtatgaacctagagaattaatatatggtgatatcagaggtatgcaaatgaaaaaaaagaagaaaacaaaatatatatataacgattttatgaaaaagagtacccaattaaaaaagaaattaataaaaaatgatttgaaatataatttaaagagtaaaggattagtatttttatatgcaatgattgataaatatggaagtatattaaataaaagtcaaaaagcaaaagttcaatttttaaatagtacttcatctatacgttattatctatatttaaacaaagtaatattcaagtcagcaaaaacctatttagatattatgaaaagagtattagaagaattacaaacgtctaccaatacaccattgaaattccttgttagaggaaattatatagaaaatataaataat

SEQ ID NO: 321 - DNA, 2628 bp, Plasmodium falciparum
aacaattcaaacaaaatatgcaatataagtaacataataaactgcaaccttttgaagaataaggaagacgaatttgttgtggaaaaacaaaatgatcaaaagaacttaaccgatttatataccaataacaataaagatagttgcgtggaagaaggcaagaataaatttaaaaaaacaatttctttttctgatatcaagaataacgatataaataatagtgaatatgaaagtatgggaaacgctataaataaaagtaattttaataatgaaaaaaagaatgaacgaaaaacattcgaggaaaataaaaaggctgtcagtttatcaaaggacaatgatgatttatatcacaaaagagaattagtgaacaaggatttccttgacttattaaataaagctatgaacatattttctaataattttctttttctatatttatatgtctattatattattcattatttttcactttatgatatattattcatatgggagagaaaaaataccaaaaaaaggaaggaatctaaaacgtatcatcaaaagacatattttcaaaatatgtccttaaataatttaatcaacaataatgtttcaacgtctcatacgaataaagaaaatactaaccttttcaatattatgaacaagaaaaaccaaggaaataaaaatctaacaaattgtattaaagaagaaattgataaaatattattttccatgaaaatattagaagatacgaattgtagcgaaaatgatgaaaaaacaatatttggttcattagaaaaaaaaaatacaaaaaatagaagaaaagcaaatactccaaatatatatcaaacgaataaaaagaaaactggacagtggtataacaaattgaattatttaaacaacataaatataagtagtaattataataataataataataataataataataataatacttataaaaataataatgaatatattgatattagtaatataaaattattaccatgttgtatacccatattggttatattatataaatatatacatagaaatatttgttctaaaaaggaaaaaaataattcggacgtatatatatattttcatttacataatttaatgtctgaaataaatataaataaaatcacatgtgaattacataaaaataattgttgtaatgatagtacaaaaaaggatcaattcgatgatagtaattgtttttttatatattcaaaggaaaatgaaaaaataataaataaaaataattttttttatgataaattggaatgtaatacatcctggattaatagtgaggataatgcactatcaacaaaatatcgtgatgatcaccataacaatgtaaaaagaaaaataagtgtaaaaaatatatatttagaaactatggtatggataggtttaagcgaggttttcatatatctaaatgtatgtccaaaacttattatatattttttccatataattaatacctatataaatttttatttaagtttgaataaaaataataatacatataactatgaaaaatgtaattttttttataatttaactcaccaatttatgtgtgtcaagtctctatttcttttttatttatattcaagatgtacaaagaaaaaaatatataataaaagatttaccagaaacagatatgaattaaataatatgcctgaaatattacaaagttataatatatatagtacaaaaaacaacataatactaaacaaagataacatgacgtcgtttaaaaatatatatatgaaaattcttttattcgagagagaagcacagaagtgtaatacatatatggatgtttttgataaccatcaaatattgttagaaaacaatcatatatgtttgcaggatgatcatattccagaatataattttaaattaccatatcgtactatagacaaaagcagaacattgaaatctagattctggccttttaaaactgaaaagaaagaatttaatactataaaaaatgatataaaagatataaataaaaaagataaacctaatgtggtagaaaatgttgaagataaacatatgttatctgatgataataaaaaaaaagaaaagaaaagaaatataaagaaacataaggaattaataaaaaaattacatttagatgaacagaaattatttaattcattattttatcataatagcttcaataaaagacatgaagaatataaaataataaaaaatataaaaatatatttatccttaatgaccaaaatatattataataataggaaggttcaaattttatatgctcgttattattttttaaaagaaaaatatataaaggttataagtatcttatctttacttaatgatcattataaaaaaaaaacatattattttaaaagagacgaaaaaggttatctgacaaatctacaaaaaactagtaacaaatcaaataataaatatttaaataatatcttgttttttcatttaaataatcaatctgattttttatatgaatatttaaatatctatatgtattatcaatcatatatgaaaataaaaaattacaaaaaagctaattattataaaaatatcttaaatactatatttttatattgtccaattataccattccatttcttcccatttataaatctttaa

SEQ ID NO: 322 - DNA, 2067 bp, Plasmodium falciparum
atgaataaactattttttttatgtttccttgtgataattatatattcattaagtatttattattgtaatgataacattttagaaaatgcaaataatgacgattctacaaaagatataaataatattaataaaaattcatcgaataaatcaaagagcgagaaaacaagtaactacaataatgatcaatataatatagacgacgcatataacgaagacgaagagaatgatgaagaagaaggagatgatgatgaaaatgatcatttcgaagtcccaataaattgtagcggtggtaattgctttgattctatggatgatataaataaaataatagataataaaaaaaagaaaatgaaatatcgaagaaggagagggaaagctatacaaattataaaaccaaatgtaaatcatacggaattaattataatagaagaaaatttagaaatatttaaaagaatagataaacctattgctattgtttcagtattaggtgatatgcatacagggaaatcttttttacttaatttattaaatgaacatgtgataccagatattaataaaagtaacaaatatattgaaaatgggttcaaagtaggtaatgatattactgctagtacttatggtatatggatatggtctgaacctataagaattaatgttaagaaattaaaaaagatatatgaatatattaatgaaaactttacaaattttataaaaagttatgaatatgaaaaagatgaatataatgaagaaattattgatttattaaatttatataaaacagatgattggatttcaaatgtcgaagaattaaatttatctgatacagatgaagtcaatttaattttaatggatacacaaggtttaaatagtccaaacgtaaataaaagatatgatgaaatattatatgccctaaccaatttaatatctacagatattatatttttaacgatgaaaatgattaacaataaagatttagaatttatagaaaacataactaaagatgctaacttatttatgttaagagcatatactagatcgagtggttctactttttctattaaaaaaaataattttcataaaattttagatacacttaataataatttagaaaataattctttaatattagaaagtattgcttctaaaaacttaatgtgggttgtacatgatttcagtcaacgtcttgatgtcagaaaaggcaaattatggttagatattttattaaattcggatagaagagatttagatattaaatattggaaaaaaataatttctaataaaagtaaagataaacatgatgcatatacaacaaaaaaacaaaaaatcgcttatttaacatataatgagaattctagttctggtcttttaccaaataacaataataataataataatagtaatgattcgtcatctaattataaattaaatatattatataaaaatatcgattgtgttttattaagaaatatgtatcacaataaagaatttgattttactaaagctaatattaacgatttaaatgaagaatataaaaatgatgttttgttattaagatataaaatatatctaagagctttgttatttcccaaaaaaatgtattctgatgttcaaattaataatattataaataaaattagaaaagaacaaaaattaagagaggaacaagaaaaaaataaagataataagaagaatgataccaataatcagacaaatgacttaaatagtaataaagacgaaacatcagggtcacaagtaactaatcgatttatgtctggtcatgatgtatatgattttattacctttttagtaaagtctgcaaatcaaaacttatttacaaatgtgaatcagttttttaaacattttaaaattaatagagcagaaataagtagaaatgatttaatatttttatataaaaaatatttattacaatttatggaaaatgaagatgttgaatttattagtaatttgaatgatgaaaatgatgatttatttttacaaaaagaaggaaataatacgtcagtaaatcatgatgaaaactcagatgcagattcattatttaatgatcat

SEQ ID NO: 323 - DNA, 2535 bp, Plasmodium falciparum
atggtacgtcaaaaaaaagaagattatttattaaatagtaaaagaaatgatttatatgaaaagcaaacattttcaattagtaatataaatgaaaagacaaaaataaatataaataaagaaaaaaatgataataaaaataatttagaatcccattatgaatatttaagtaatgaaattctgaaatttatgattaaatataatgaaagttcaaaaaattttaaaatggatgtaaatgaaatagatacagaacttttaagtactagcataaaaaaatttgttcgaaatttaacagaaaaagaaatgaatcaattattatgtaacaaggattatattttttcaaaaattattatggaaagtttagaaaataacgaagtcaataaaaatgatacaaatgttacatgtgataataaaactatgacagatgatgaatataatatagataagaataatacagatataaaaaaaaatacagaccctagtcataagaatgataatataaaacatgatttacaattatgtggtagtaaaaccatgtccaatttttataaagagggaaacacaaatgatattgatacatcacgtaataataaatcgtgtgaaaataattctaataatatttacacaaatgtatcaaaaaatatgaataaggaccaaatttttaataataatgttaagaagaataatacatttaatgttaatattaataaaaatgcaccaaataatatgagcaacaacaacaataataataataataataataatgtaacgagttgtataaataataatggaaaaaataaaatgagatcattgaaattgtcaaatgataatgtcagtatgctgtataattattacttagatatatgcagagataataagtcacaattagaaaaaaaaatacaagatgataataagatcaatgaaaagattacaaatgaaaatcttatggaaaatgtaaaggacgtaattaaaaaggaagacaatacacatataaatgatacaaatgatacaaacgatacaaaaagtaataataataataataataataataatagtagtagtagtaataataatcacgtggataagttgaaaaacgtaacatatgatcttaatactatctcgtcgactaaaagaaaaaattttaaagaacatataaattattttttcaatgattgctttaaaaattttaaaaacttaaatgataaaattaaacacaaaaaaatttccgaaaatgttgctaatacgaataatgataaaaaagaagaaaataatggtaacttgaatgaaaaacataaagaacaaaatattgataatgtattgaatactagaaaagtaccatttgatggtcatatattagatgaacagacctcgtgtaatgataaagatgatgataatttagaaagtgaaaaaaagacatttaacaaatgtacaagtgtaacaaagaacgaatctaataatatgatattaagaggtgataaaaataatgatatcataaaaaaaatgagaactaatgatcatacagacagaatgacatttgaacattttaataataagataaataatataattaataaatatgaatataaacaatgtcttaataaatatgaaagacagttaattaaatttgtacagacgtttaagaatactaaacaagatcatatatcttcacaaatatataatgatcataatgataaaaatgatataataaagtacaaatatgatgaagagaatatattaaaagcaattttaaagaatatgatgtgggaaaagtcaaatatgaatagtaataataataataataataataacaattcttcaagtaatgaatcgttcttttcatttaataatagtattaaagatatcgatgataattttgttgaaaatgctgatgatattatatatggtaatattgaccataataataatattaaaaggtcgtatggttctaataatatatatgattataataatcatgatagtagtagtggaagctgtattaaaatatcgagtgataaaatgataagttataaaaataataaaacagatgagaaatattcaaatccaaaaaatatatatccaattaaacaatcatgtagtgatagtaatcattatatattacaaaagattatgaaaaataagagagaaaaaagttgtaataataatgaagaaaataatttctcatttaatgatattttatatgacaaacgttcaaataattatgataatagtattagtatgtcctataataaatgttttcataaaaatataaaaaatattacgaattcgattactaaaaattatttgtattataataataataataataaatatggaaaaagaaatgaaacctttgaacatatatcaaataataattatgggaatcataaaaaaaatgaaaatatattaatgccatctcagtctaagaatttttcttgcttatcttataataaggaaaataattcatttcccattatatgtaatggaaataatgttgatgaaaataaattaaaaaatagttgtgtaggaaatatgattaaa

SEQ ID NO: 324 - DNA, 2118 bp, Plasmodium falciparum
atgacaaaaaaaagaggagatggagttaagagcataagttttgtcctagaaaaggaatcgaataatattatgtttgataaaattaatgaagaacaagatgaaactgaagaagaatctgaaatgaatgtagacgagtcaagtgagaatgagtatcttgaaaatgtatctgaagagaacgaatctggtgataatcaaacaggcgagaatgattccgaggaagaggactcagaagaagatgaggattatgaactaaaaaattatggaatagccctcgagttacctcaacgaaaaaatcgaggtaaaaatatgaagaaacttatcggtgaagatttagaaaaagatgaacaattttggaatgatagcatatgggaagaagaagaaatagatgaagaatatgtgaattcagaaggagaagacgaatatgttgatattacagactccgattttgatgatgatgaagataatgaagaagacgaagaggaagaagttgatgatgatgaacaaaacaaacgtggtgctcgtagacatagtatcgaatatgaagaaaggaaaaataataataaaaaaaattttgcatatttagaaaaattaaaaaaagaaaaacaaaacaaaataatgaaatacaatttaatgaaacaaaaacaaaatgaactaaaaaaaaataaacaattgatttctaataaatcaaaaaaatcagaagatgatgctgaagaagaacaaaaagaagaagtaattaaaacaaaagaacaattaaaagaagaaagaagattaaaaaaaaaaaaaaaactagaacaggcttatttatatttaaatagatctactagagatacaacaagaagaaaaacggaatatatggaaaaagtttttgaaatgagaaaaataaaaaaagagaatcgttttaaaaaatttggtgcaagaagaagagaaaaaaaaaatatgcaaagagaaatgacaagagaagaaagattagaagaagccaaaattacagaacaatataatatccaatccttattacaattacaagcatgggaagaagaaaaaaaaaaatatatagaaaataaaaaagtaatacattataaaccacaaaatgtatttattagttttaaatattcgaaagataacatatttccaactaatgaaaaattaacatatactcaaaatttatatgattattacctatataatgaaaataggacaataaagaatgatataatgaatcaagtaaaaaaagaaataaatgttaatataattaataacaaacaaatagtaaaagttgaacaagaattacataataatcatgaagaaaatataaatagtcaaaagaaaaattcttctatgtcaattaatattccccccccaataattccagataataaagagaaacaaattaataatgataagaacacaattttgtcaaatcgaaatttaaatgataatacaaatgattatccaaatgattatccaaatgattatccaaatgataatacaaaagatgaagaaaaaaatggacttatcttaaatccaatgaatttggagaatttagaccaatgtgaagatttaaatatacaatatctaagtcaaatagatgatataaattttgataatttaaataaaaataaatctaataataataataataataatatattaaattctaataatgaaaatatgtatgatgataataaaaataagtcaaatgtattaaatcaagatattaagaaaaacaaaattttagctattccaaattatgaagagaaacaatattatattgtcaccaatgaaaatgagctaaacatttatagtaattttaatgatcaaaaagataacataaaagaattaaaaaatcaaaaacaagaaaaacaaaaaatttgtgctataaccaatttagaaggtaaatattttgaccccctaacacaacaatattacaataatgcagaggcatttaaaaaattacgtttatattatcatcaaatatcatacaataatttaaataaggatatatgtctaacagtcaaacatttcaaaaacaaattagccgaaatagaacaatacgtaaatagtaataataatcataatagttgtaatgatataccttgtaataataatgtgaaacattaa

SEQ ID NO: 325 - DNA, 2490 bp, Plasmodium falciparum
aatgacaatcgtaagtataatggggaggaggtgaaaggagaaaatgtagaagaagatgaagaagatgaagaagatgaagaagatgacgaagaagaagaagaagaagacgaagaagagggagatgaagacgacgaagagggagatgaagactacgatgaggaaaatgaagaggaagaggaagatgcaaatgaagaggaagaagaagatgcaaatgaagagttagatgagaatgaagaaaatgaagataaagtagaagacccaaatgaggaagattaccgttttgatgtaaataatgatgaagatattaaagataacaataatgctgatataaatagtaggaacaaacataaaaataaaaaaaataataatgataattttaacaaggatgatgatggtcaattacaaaatattacgttagaaaataatgacaaagataaagaatctaataataataataaaaccaatgttgacataaaatcagacaaaataaaatccaatttggatatactaaaaagcaaaaaaaaaaacaaaaaaaggaaaaataaaaaaaagaaaattaatttaaaaaaaaaaaagaaaagttatgaaattaaagaaaataattacgaagattattccgaatttgataatatgaatgataatgatatcgaaaatgaagataaaacaatggatgttataaatccaggtaatgattggataagtgatataaaatggaaagaattattagatatagagaaattaaaaaatttcgaaggatttataaattctttcattaaatctattagagaatggagaagatggtttaattatttacaagtggaaaatcttgtatttccagatgaatgggaatataatttaaatagttttcaaaaattgattataataaaaatattaagaccagatagattaaacaaagcaatagaaaattttattttttctaatatgtcttataatgatatagaggtagaatacatgaattttgaatatatattacgcccttctaaaaaaaatatagaaccattaattattatatacaaacctaattatgatccgtttgaatatatttacaagtatgctttggataataatcaaaagttaaaaaatattactctaacaaattataatataaattatatatataattatttaagggttgcaatgaaagaaggacatgttttatatataacaaatttacacaattctaatgaaaatttattaaaattgacaaagttaattgaagatatattaaatagtaacacaaaatatatatttaatacttctgatgatattaatgtggaagaaaaatatgaaataaaaactatgaatatatcacgagaggatgaatataaacataaagaaaacgtacatagaaagataaatgaggaagaaattgtgttggataaaaatgttgatgatgatattaataacaatgaaatagttaatgaaaaggatagagaatataatgaagcatttagtaccttagataataataaaaaaatatataataccttaatagatgaaaaatataatactatgatgattaaaaattgtttgaaaaagagaaataaattcattactgttcatccaaaatttcgtttattcttgtcaacattaccgggtaaagaaatccctatatcattattacaaaaaagtattattgttattttggaagaaccacataatataaaaaagagtatatctatattatttaaagaacattgggcattagaagaaaacaagaatgttcaatcaaataaatttagaaaattgcttttcagtttattttggtttcattctattttaaataatagaaaaaaatttgataatttaggatggaataatgaagaatattttttcagtaataaagatgtcatcctaagtaaatatataactaaaatattttttaataaaggtgtaaaagaaatacattggccatattattatttctatatttgcgatattatatatggttcaaaaatggatgattattttgataagaaattgttaaatgtatatgccaaagtattttttaataataatatatttaaaggtaaatatatattctctagttcaacaaattattatttacctatagatgtaaataatgaaaagctattaaataattatttaaaagaaattccttataatgatagtgtagaattatttggacaaaaaccatatgcagaaatatcatataatacaggtgcatcagaagaaattatatcattacttttttgtgttaactccttgagtttgaatcagtatcatttccataacaaaaataatataaatataaatgaaaaacttgtatattattttacaaaaaagttactacttaatatgcctcgtgaaatatacgtggatgaattaatgaaaaaacaatataatcctgaacaatatatatatgcaaatctattatttaaggaagtgaataaacataatattattttgaaaaaaataagaagctctcttaataaagtacaatatgct

SEQ ID NO: 326 - DNA, 2352 bp, Plasmodium falciparum
tctgaaagtcaaaaattccgatttatatatcatttttatagtgttagattattaggagttagtccatctgatttatatatgaaaactaataaatttttatctatgtatgatgcatatgtaaggaaaaatgaacgaaatgcagataggataccaatcatgtttaataaatttggtatactacttgaagcacttatttataaatgtattcaatatgatattataaataccgatataagaaataataaaaatgaagcaaaaaatacccaaaatgttggaaatgacggaaatgctgcaaattttgtaaaatcaggaaatgttaaaaatgctgcaaattttgtaaaatctggaaatgttaaaaacgcttcaaattttgtaaaatctggaaatgttaaaaatgctgcaaattttgtaaaatctggaaatgttaaaaacgcttcaaattttgtaaaatctggaaatgttaaaaacgctgcaaattttgtaaaatcaggaaatgttaaaaacgctgcaaattttgtaaaatcggaaaatgttggaaattctagaaatgctgaaattcatgaaagtaatagtcctaatcacaatggggataaaaatgtagatccctctgataacgttacaggaacaaaacaagatgaaaatgaaacaaaaaatgtaatgcaaattagtaatattttatctaattgtatattaagcgaaataatttcaaatatggaaacaatgaagtttcctaataaatattatccatgggataataaaaatgtatttgaaccatttttagaattattatgtatatgtaaggatttaagttgtacaaatacaatgtgttatagatccttaattagatatattaatgttttcattcaaaatactatattaagaatatttgttttaagaaattacaaatttatagataaaacgcgtattgattatttcaaaatacatatgttattaaaattaatctgtacctttaccccttgttataattctcgaattgtcaaaatatcttgcttctttatgattttcataattatgaataagaaaataaatcgatataaacaagattatacaacggattgggacaatcccgattttgaaaaattaaaagaaaaatattacccaagcagtgatccaaaaaaagaaggattgtcaaaaccaaatcacatgtatggagtcccaatagaggtcctacgtttttttataccacactataaacaatgtagaccagaagattttatatactgtcctggatataaaccctatgaaaatgactattataatgtagatggtaccgttcgtattattcgtgatcatatgagatatagtttttatgttgagaatatttgttcaaagaagatgcgtcacaagagaagaaacataagcgcatttaataaaattttatataagaattttaaatcaatcaaaaaacaatttactatgtttcatcgtccaaacatgttaaatttatcttatgattgggattcattccaaaaagatattatggtattagtaaaccaaatattaacctcttacgaatggcatggacatggagcttttgaatcattcgtaagtatatggagatttaagaaaagatattctaagtcctatacatctactaaaagtgttgaggaaaattttagaaatatagaagaagacttagctgatttagatgaagattcaacagaaaatattaatgaacctaatcatttagatggtcaaaataataaaaacaatagaaaaactaataatgataatacattgaaacaaaatcatcgaaaatctaggggcacatctgtacaaggacgcaaaaataaaataaatcggggatcaaaaggcaaacataattctataaatattccaaaagatagaaagacgaacataatgtcacaaattaataaattcatatttaataaaaaagatattaaaataaaatgtgaagaaagtagtagttcaaattatgaagagggaaatagttcgagtaatgaagaaaataatatatcaactgataaaaatataagtaatacaaataataaaaatggagtttcattatatgataattcaaaggtttatttgaaaggagattataaatttagcaaacagtttcataagtacatacacaagaaccttttagataatgtcgataaaacagatagaacaattaatattatatcaaaattcttcggtggtgtgaataagtccaataacgtgaataatattaatagtgtaaataaggagaataacatgaataaggtgaatgctgtacataagataaatgctgtggataaggtaaatgctgtgaataaggtaaattctgtcaataagctaaatgttgtgaataagacgaatgttctg

SEQ ID NO: 327 - DNA, 2352 bp, Plasmodium falciparum
aataaggtaaattctgtcaataagctaaatgttgtgaataagacgaatgttctgagtaagttgaatgctgtgtataaggtgaattctgtacataagatgaatgctgtgaataaggtaaatgctgtaaataaggtgaatgctgtgaataaggtaaatgtcgtgaataagaaggatattctgaataagttgaatgctttgtataagatgaatgctgtgtataaaatgaatgctttgaataaggtgagtgctgtgaataaggtgagtgctgtgaataagatgggtgctgtgaataaggtgtgtgctgtaaatagggtgaatggagtaaacaaggtgaatgaggtgaatgaggtgaatgaagtgaatatggtaaatgaagtaaatgagttaaatgaggtgaataatgtcaatgcagtgaatgaagtgaatagtgtgaacgaggttaatgaaatgaatgaggtgaataaggtgaatgagctaaatgaggtgaatgaagtgaataatgtcaatgaggtgaataatgtgaatgagatgaataatgtgaatgagatgaataatatgaatgagatgaataatgtcaatgtagtgaatgaagtgaataatgtcaatgaggtgaataatgtgaatgagatgaataatgtgaatgagatgaataatatgaatgagatgaataatgtcaatgtagtgaatgaagtgaataatgtaaatgagatgaataatacgaatgagctaaatgaggtgaatgaagtgaataatgtgaatgaggtgaatgatgtcaatgtagtgaacgaagtgaataatgtaaatgagatgaataatatgaatgagctaaatgaggtgaatggggtaaatgaagtgcataatacgaatgagataaatgagatgaataatgtcaatgtagtgaatgaagtgaataatgtaaatgagatgaataatatgaatgagctaaatgaggtgaatgaagtgaataatgtgaatgaggtgaatgatgtcaatgtagtgaacgaagtgaataatgtaaatgagatgaataatatgaatgagctaaatgaggtgaatgaagtgaataatacgaatgagatacatgagatgaataatataaatgaggtgaataatacgaatgaggtgaataatacgaatgagatatatgagatgaataatatgaatgatgtgaataatacgaatgagataaatgtggtgaatgcggttaatgaagtgaataaggtgaatgattcaaataattcaaatgatgcaaatgaaggaaataacgcaaattattcaaatgattcaagcaatacaaataataacacatcaagcagcacaaataactcaaataataatacatcgtgtagttcacagaacaccacaactagcagcgaaaataatgattcattagaaaataaaagaaatgaagaagatgaagatgaagaagacgaccaaaaagatacacaaaaagaaaaaaacaatttagaacaggaagatatgagtccatacgaagatagaaataaaaatgatgaaaaaaatattaatgaacaagataaatttcatttatcaaatgatttgggaaaaatatatgatacatataaccaaggagatgaagttgttgtatctaagaataaggacaaattagaaaagcatttgaatgattacaagagttattattatttatctaaagcaacactcatggacaaaattggagaatcacaaaataataacaactataatgtatgtaattcaaatgaacttggaactaatgaatccataaagacaaattctgatcagaatgataatgtaaaagaaaaaaatgattccaacatatttatgaataatgataattataattcgtcttatgataatgtacataatgataatgataataatatggtatttaaagattcttcaagacaagataatatggagaaacaaaaaagtggagaaaacaagcaatatttaaacaatttcgataataatggtaatgataatgataatgataatgatgataataatgataatgataataataataataataatatgaataatcaatataattatcaagaaaataatattaacacaaattataacattttgtacactccttctaattgccaaatccaaaacaattcatatatgaatacaaatgaaatgtaccaaccattatataatacatatccttcaaatgctattcaagaaaattctactataaataacaacattattaatgtatcaccttacatgaataacgacaacaccactaataacaccttcatttctggtatgaattctaatttaagttctaatatttccaatattaataataacacatactcatatgatttatatagttcaatgaac

SEQ ID NO: 328 - DNA, 1674 bp, Plasmodium falciparum
atgagatttgaaaatcagtttagtaaacatgatatcgttacgtccgccagtggtgtaatagcattattaaatgaagaagaaacaagtttaaagctttttggtctagaaaaattaaatgcaatagtagatgtatattggccagaactcgctgattctatatttaagatagaagaattatgtgaagatgaagattttgttggtagagaattagctaatttattggcaagcaaaatatattttcatttagaaaaatattcagaagctttaaaatatgcattgtgtgctggtaaattatttaatattaaagaaaaatcacaatatgttgagaccatgttagcgaaatgtatagagaaatatgtcgaaatcagagaaatgcaatatgacatagattataacaatcaacataatataaatgatgggattactaataataacgatatttttaatgcatacaataataatgatttagtagaacttaattcacacaatgaacttttaaacaaggaaacagatatattcagatttgatattaataatgaaattaatcaaaaaatggaactacttgttgatgaaatgatagatgtgtgcataaaaagtaatgatattaaagaagctttaggtgttgctttagatgctagacgtttagataaagtagaatatataattgcgaatgcagaaaataaaatagaaattttagctcactcaattaataatgagaaacatataaatatgaacaaatcatttagaaatgagtatttcaaattattagtaaatttatatctttcattaagtgaagaagaattaaaaaccgaatatattaacttatgtgaatgtttatattatatagatgattataagaaagtagctgaaattttattgaagttattacataattatcatttaatggcatatcaaatatcatttgatttagtagattttgaaaataaaatatttctaagaaatatactaggacaaataaaggaaaacttaatacaaaataaagcatattattttggtgaagagtattttgttacaacaccacaagaagaaaataatgatgcagataataaagaaaatgaaagtaatgcaataacgaatgaacaacaagacgaaaataataatgaaaaggaagataaagataataatgatggtaaaaatcctgaacataatgatgataataataaacctaatgataatctaacaaatgatgaacctacctataataataatgatgataaggcaataaatgatggcaatgataatgataataataataataacaatattaataataataataataatattgttgaagatgtattgaaatatatcagtaaaaaacatatattttataataaaatgaaaaaactcttatatatattaacaggaaaagttacaggaaatttatatatagaatttttgcatcgtaataatcatgcagatttaattttattagatacatataaaaatatagtagattcaagaagtagtattactcatcatggaattgttatagcacatgcactaatgcaaacaggaactacttgtgatgtttttcttcgttcaaatattgaatggttatcaaaagcaattaactgggagaaattttcagcaactgcttctttaggtgttgtatataaaggacatgttaacgaatcttttatggttttatct

SEQ ID NO: 329 - DNA, 552 bp, Plasmodium falciparum
gccttgagagaaatatgggatcaatgtaccatcgctgtttacaacaacacattaaatgccgtagaatccaaaccattattatttttacacggtatattaaatgaatgcagaaacaactttgccacaaaattaagacaagatccaagtttaatagtagctaaaattgatcaaataataaaatcacaaatatatcgtttctgggtatcagaaccatacttaaaaattggaagatcacacactttatatacacatataacaccagatgctgtaccacaattaccaaaagaatgtacattaaaacacttatcatcctatatggaagagaaattgaaatctatggaatcaaagaaaaatatagaaagtggaaaatatgagtttgatgtagattctagtgaaactgattctacaaaagacgacggtaaaccagatgacgacgatgatgatgacgataattttgatgatgacgataattttgatgatgataccgttgaagaagaagatgccagtggagatttatttaaaaatgaaaaaaaagatgaaaataaagaataa

SEQ ID NO: 330 - DNA, 747 bp, Plasmodium falciparum
gattcctatcttaaaaattgcaatgaacaattcaacgtcgattttaaaggcgacaatatcgagattgctcacatgatatgcagaatttttcctatggtggattattttgctatttctatgattctgtttattaggtccttcttattagagagtgatgaaaatcattgcttgaagaggctatttaaataccctcctgtagaaaatataaaaattttaatcgatttgtcctttaaaatcaaacatagaaatgagaaaaaagaaaaacatacaaaaaaagaagaacctcatattattcacaataataatttaagtaaaaaagaagatatatttaatttaacatttaacaataataataataatataactcatgaattaaataaacataacataaacaataacataaacaataataatgataggaaaaacgaatataaggataaaaacaaccaccattcaaatgtcaatattttatcttacaacaagatattaccaaatgtacataaaattaataacatagcttatataaataaaaaactattaaaagttattcataatttaaacaatctgtatacatataatatgttaaatgaacaacattataaaattgaattacaacaaaatatatttctcctgaatgaaatttataatgagcttaaaggcatacaacaacactcatatgatgatactgtatcagaaaatatacaattggataagacgaatgatttaccctccatatatttgggttga

SEQ ID NO: 331 - DNA, 2793 bp, Plasmodium falciparum
tatatatgtcgaattataagaaagaaatattccgttttgagaacatgtaatgtgagaaattctcgaattttatctgggcctcgcaaaaattttttttttggatcatgtaatactaataatataataaatgatctggaagaaattttgagggatgaatgggatatcgaagtagataatattttaagagacgatgatactagtacattccatgggaatactagtagttcagagaatagtaattatttatcgataaatgctattcatcgtatacatagaggtgatgatacaaatatttttgaagaaaatgatgtagtttctgtatctgaaatagtggagagtttacatgattctgatgaaattgatcatacagataatattgataatattaatagtatgaataatggccaaaatgaggatgttgattatagtgatgtctcaacatgcgctacagaaagttcattatcaaatcatgatactgaaaattataatgcttcacccaatactagcgatgataacgtgaatgcagatatttcaaatgatcattctaggaatgtagaaaggattcaaaatacgtataatttatttattgtacgtcctaatacatgtcagaattcatatccattaatgataaatatagttaatgaacatggggagccttgtgatcgtcatcctaatattaggaatactgtaggccattatgaaatggaatatataaggcatcaatctagagaagatatgaatacgctttatgaatatgccttaattcgttttcctatttataatgaaaataaagatatgtgttctctagatgaagatatattatacgaaagaaactttctgaaagattttgaattattaaaaagcaaatcttatgatatgtttatagatattcattttaggttacgtaaaggcatacaatgtacagatatgttatctattttttcttttgataataattatggttatggttattattacaataataatttcagtacagatggtgagcaaaacaatagtagggatatgcataacgaacagtctagtttaaatcaagatgtacaggattctttttcaaatggaaatggaacccatacatctgaaaataatggaagagatagagaaagtactaatatttgtatgaatgatcgttgcccttatgataattataatatatttgatagagatcatactggaaacatagaaaaggtattagatcatagtgaaaaggagatagacccctctaaaagtgatataaataaagataaggataaaaaggaaaacaagcaaaatgatagtactgaaggtaaagaggaaaataaagaggaaagtaaggaggaaagtaaagaggaaagtaaagaggaaagtaaagaggaaaataaaaaggaaagtaaagagcaaagtaaagaggaaaataaagaagaaaataaagaagaaaataatgaaaaaaataatgaaaaaaataaagaggaaaataaagaggaaagtaaagaggacaataaagaggaaaataaagaggaaaataaagataacaataaggaggtttgtgagaatagtactggagataaaaaggaaggtaatgaacatgaattaaataataggagtggtaatgtaatcgaagtatataatagaacggatactatatttgataataatgaacaaaatgtaaatgaaataatagggacaagaccagatatgattccaagagaattaaatgtaccttttgataggtatgaagtagatagtttgtgcttatggtcgaatatgtcttcagaatcttctatgaattataattaccgtcctaatttggtacatacacaaaatcaagaatcaagtaatacaagtgtggatatggagattgttccaccatatatgccagatttaattataacggaatcacccactaatacaagcggaacgaattcttcgtacacgattcctcaatattactatagaagagaacaaataaatgatacgaaagaaagtcctgttactgattatgatgatctttattcatctactgattcatatgaaagggatttatcgaatatatcatcttcttcggatgaaagtgaagaaagtgatgtatctgctactactagtgaatctgaagaagctattatatctgtgacaagtagtggatctgtatgtattatgtctgcgactattagtgattgtgaagatacacctataacaacttatagtgaatattctgaaccttccgtacataataggcaacaggaggaatcacaaaataataatagtgtttctaaatcagataaagattcaaactttagagcgtatcatgttgaaataatatacaatgatatcgattttaatttgttacaacattttataaattataatggttataaagatacgcagagacgaaaaaatttagattctctattaaaagcgttagaaaatttaccaaagaaggacaagtcgttgaatgtgtggaagtacggacttaaagtatcattagaaattatagaatatgtttctaacgaaatgtttgctttggcaaaagtcataagagatgattgtaaagatgatggttgtaaatggtgtatggcacatagtaaattcaaaatagatatattaacgttgaatttttttatgggttctaaacgatcgaatccaaatttgtcatataaatatttaactggtaaggaatttatacttacacgcttcaaaaaattagtatatgattcgatagatgctattgaaacatatattgctattgtagaatgtttccttttgggaagtatatttgatacaattaaagattcttag

SEQ ID NO: 332 - DNA, 1557 bp, Plasmodium falciparum
aacgaagcctaccaagttttaggagatattgataaaaaaagatggtacaataaatacggatatgatggaataaaacaagtcaactttatgaatccatccatcttttatttattatctagtttagaaaaatttaaagattttaccggaacaccccaaatagtaactcttttgagattcttttttgaaaagagattatctatgaatgatttagagaataaaagtgaacatttattaaaatttatggaacaatatcaaaaagaaagagaagcacatgtatctgaatatttattaaatatattacaaccatgtatagctggtgattcaaaatggaatgtaccaattataacaaaacttgaaggtttaaaaggatctcgctttgatataccaatattagaatctttaagatggatattcaaacatgtcgctaaaacacatttgaaaaaatcctcaaaatcagctaagaaacttcaacagagaacccaggctaataaacaagaattagcaaatataaataataacctaatgagtacattgaaagaatatgtaggaagtagtgaacaaatgaattcaataacatacaatttcgaaaacatcaattccaatgttgataacggaaaccaatcaaaaaatatttcagatttaagttatacagatcagaaggaaatattagaaaaaattgttagttatatagtagatatttccctttatgatatagagaacacagctttaaatgccgctgaacaattgttgtcagataattcagtagatgaaaaaactcttaaaaagagagctcaatcattaaaaaaattatcatccattatggagagatatgcaggtggtaaaagaaacgataaaaaagcaaaaaaatatgatacccaagatgttgtaggatatattatgcatggaattagcacaattaataaagaaatgaaaaaccaaaatgaaaatgtacccgaacatgtacaacataatgctgaagcaaatgtagaacatgatgctgaagaaaatgtagaacatgatgctgaagaaaatgttgaagaaaatgtagaagaaaatgtagaagaaaatgtagaagaaaatgtagaagaaaatgtagaagaaaatgtagaagaaaatgtagaagaaaatgtagaagaaaatgttgaagaaaatgtagaagaaaatgttgaagaaaatgtagaagaaaatgtagaagaaaatgttgaagaatatgatgaagaaaatgttgaagaagtagaagaaaatgttgaagaatatgatgaagaaaatgttgaagaagtagaagaaaatgtagaagaaaatgtagaagaaaatgtagaagaaaatgttgaagaatatgatgaagaaaatgttgaagaagtagaagaaaatgtagaagaaaatgtagaagaaaatgttgaagaaaatgtagaagaaaatgttgaagaagtagaagaaaatgtagaagaaaatgtagaagaaaatgtagaagagaatgttgaagagaatgttgaagagaatgttgaagaatatgatgaagaaaatgttgaagaacacaatgaagaatatgatgaataa

SEQ ID NO: 333 - DNA, 2460 bp, Plasmodium falciparum
atgctttttaaaaatgaagacagtggcaatggtgtttactgttttacttataataattttagtgatgttactatatctgatattttaaatataaggaatgataataaaaataatgataatgaggataacaaacaagacgatgaagagaaaaacgatgaagatgacaataaaagtaatttgtttttagaagaaaatgaagagaataaaagacaaggagacaaaccatttgaggatttatctttattttcatttaaaaataatgaacagtgttatgataatataaaaatgcaacaagccattttgaattcatcttatgaaaaaaatgtaaaaaatatagttaagatagtatatcatgaggattgtaaattgttatatgaaaatacagatatacacgttgaacttccatctatagtatatggtagaaataggaacaaaaataatgatgtcgtaaataaatgtaatcaatataatgatgatgattatacaaataaatgcaatcaatataatgatgatgattatacaaataaatgcaatcaatataatgatgatgattatacaaataaatgtaatcaatataatgataatgattatacgaataaatgtaatcaatataatgataatgattatacgaataaatgtaatcaatacaatgatgttagaaaaattacaaatttaaaatattttattaatcataactggaaaaatataaatttgattaatgaaaaattatttttgaaaaatttaaaggaactcgaagaaatactaaattataattttttgcatatatgtaaaaataaatgtaaacaatataataagaaaagaaaaaatgaaagacatttctcttatcacgataattttcttagtcattatataatctataaaaaaaataaatttataaaacacaataaaaatgaacatatcaatggtaatcattatgatgctcatgagagtactaacacatacgatgaagagaaaacaagagaaaaacataataataaaaataataatatgaagtattgtctaaataaatatccatatgataatgtgaacgcacctttgaatttatcttgtccatggtacgaaaagaaaatagaaaatatatactgcctaaatataccaggatataaatataaatataaatatatttgcccctcaatgagcaaaatgaatgatgaaaaaataaaagaattatatataccaaaaggacatatattatttaattcaaaattcgaatctgggaatttaaaatatgtaataaaggaagaaaatgacaaagaagtgtattccttattcctcaatccggatatacgaatgaacgagaaaaaaaaccagtggttctatttcagtgctagttatgttccaaatgaatattatacgaatgagttatataaaatgaaaatgtgtaataaagatattaatcatataggggataatatgaacgttgtgtataattacatgaacggtacaggtaataatataaacaatattgtaaataatttggatagcactgtaaattatatgaacagtacaggtaataatataaacaatattgtaaataatttggatagcactgtaaattacatgaacagtacaggtaataatataaacaatattgtaaataatttggatagcactgtaaattacatgaacagtacaggtaataatataaacaatattgtaaataatttggatagcactgtaaattacatgaacagtacaggaaattacctaaatagaaagaataataatcaccttagctatactaattggagtggacaaaggtgtatgaatcaatatttgaatgacataaataatgacgaaatagatacgaatttagatgggaatagaaaatattcgttagacgcatgtgataaatttactgttagaaatgtaaggaagttagagaaaccatttactgttagatttaaaatagaaaatatggccaagcctttttttttatataaatatggtcattcgcctttatccttttcagaatgtaagtataaaatagagaatatacaatgggaaagaaattcatatgatataaaatatataaaaaacagttcatgtaagcattataatataaaaaaaaatagtatggaatattataattataatacgtatacattagaatttagttatgattttacgtatgcatatgatacagtatactttgcaagtagttatccatatacgtattcttatttgagtgaatatttatgtttgataagaaatttgttgaaggatcaccctacaattaattatatagaagaaaggttgtgcaaaacatcatgtgggtttgattgcccagttttatgtataacaaattatgataggatggaagaatataataaagaagaattaaaagaaagtgtagaaaaaaaacaaaacattgtcgaagcgaacaatacatgtgatgaaaaattggttgatgggatggatataagtagtaatgctata

SEQ ID NO: 334 - DNA, 1095 bp, Plasmodium falciparum
ggatcgaagaaacgtggtgcagatcattctgaaacattccttaatctagatgatatgtacgaaaatacaaagtcgtacaaagcgataagcgaattattaattagttatataaaggataagaatagttgctcatttatttatatagatatgaatagtatatatccaaattttgtagatgtagtagagaaagaattaaaaataaaaaattatttggtgggtagtttaattatagcttacaattttttaaaaaagaatgggaatatgataatacgtttaagtagtgttcttacattttttacggcagggttaatttatattttattttgttcatttgataaaatagagttctttgttccaccttcatgtgatgatattagtttggatatatttttatattgtcacaactttaatgaaaattatatatatcgtcattatatacaatttatatgggatgctttaatatgtaataaacatattgatgaaaaattgtttaatatggatgaaaagaagaaattagataagcctataaataaaaaaagaaaagccgatctctatttttctgttcctatgtattatttaatgaataaacattttgtaatgtttttaaaaaaattcaattctttttattttaaacaccatattaatgtatgcttgaattttatgaaggagccaaaatatttctatcataataaaattttgataaaatctttgctgacccatttttttaaggcatatgttattcaggggaaaacatttgaaaatgtatataagtccataggaatgagttttgataatttttatgaaggaagagaagatagtgatgatgaagatgaagaggacgacgaagacgaagaaaataaaaaggaacaggaacaggaagaagaagaagagcaagaagaggaaaaagaaaaaacacatgaagcatatgatgaagagaaaagttttaaagcttttttgcatttaaatagaaaagaatcacatgcgaaaaaccaatttgaattttattcgagcgattctaattattcaataatgtgtgaatataaaaatgtgccgagtgaaatatctatatctgagtctgcatgggacagttcctag

SEQ ID NO: 335 - DNA, 2181 bp, Plasmodium falciparum
atggatgataaaaagaaacatcacaagaaaaagaaagtaggtaagaagagcaaaaaaaaaaagattaacaagaatggaaacaataaaaaatatcataaagcttttgcatttagtggaggtataaaaagtgctcatagaagaaaacaacatttatttgaattagaagaaaaaaagttaagagtacaaaaagtttataaagaaggtaataagagtagccctttaattgtagtaattcaaggtgctaaaggtgttggtaaaagtactttattaaaaagtttaataaaatattatgtaggaataacaataaataatattaaaggacctatatctatttttacaaaaaatttaaaaagatatacatttatcgaagttaacgatgatatattacatatgatagatgttgcaaaaattgctgatatatgtatacttgttatcgatggaagttatggtatagaattagaaactctggaatttttaaatattttatacacgcatggacttcctaaagttttaggtgttgttactcatttagataaatttaaagatagtaaaagcatacgaaaaagaaaaaaaaaactaaataaaaggtactcagaagaattagtcgaaggatccaaactattttttctaagcggtatacaaaataatagatataataaaacagaaataagaaatttatgtaaatttttatcggtaatcaaaaaacccatcatttcgtggagagaacaacatggatatatattagggttgaaattagatgtagacgatcttttaattaataatcaaattacatctcaaaaaaataatcttcaaagtgaacatgttcacaatgaaaattatgtgaatcacgcatcttatgataatgataatgataatgatgaagaaaatgaaaaaaaactcaccaactttttaacaaattgtgatgaaaaaattaaaatatctattgaaggatatgtttatggaagtaaaatttataaaaatcaaaaagtacacattcctaatattggggatgttgaaattgataacatacaaatcttacaggaaccttttaaattagatgaacaaaaaaagaacccaaatatttatgctcctatgtcagatgtggggaatctaacatttgattttgataacatgtatattcatataccaaagaataaagtcaattttaccagagaagaatttttgttggctgaccaaagagaggaaacaattccaggggatcacagcggcgaaaagaatggtaatacattgaaggatgatgaaggaggtggtgatggagatgatgacgatgatgatgtaggtgatgataacgttgatgatggagatgatgacgatgatgatgtaggtgatgataacgttgatgatgatgatggtaacgatgatgatgacgatgataacgatgacgatgataacgatgacgatgataacgatgacgatgataacgatgacgatgatgatgacgataatgagaattctgataaatcctcccatcataataaacaaagtaatgataatgaaaaatacatcacagatagcataaaaatgataagagaattacaaaaatcgaatggtgttttttcaaaacaacaaaaagataatttgattctttttaatgaaacgaatgacaataatggcgcatccaatataaggaggaaagccccatcgaatgtttacatcagtgaaaaacagaaaaagaaaaaacagcaagatagttatgttaatgaaaaggcagaagaatataataaattggaatcaattctttatgagaaaaaaaacaatgacgaagaatattattgtgcaaataatgtaaccatttcttctgatgatgataaagaggaaaatgatgcttcctttagagagttttacagaaagtatggattaaacgctgatatgtctgatgacggtgggaataatgatataaatatatataatggtcaagaaagcgaggagaaattaaaagatacatatgataagcttattgatggggggcacgacgaagatgactatgatgatgatgaaaatgttggtgatgaaaatgacgatgatgaggaaaatgatgatgatgaaaatgacgatgatgaggaaaatgatgatgatgaaaatgacgatgatgaggaaaatgatgatgatgatgatgaaaatgatgatgatgatgaaaatgatgatgatgatgaaaatgat

SEQ ID NO: 336 - DNA, 2259 bp, Plasmodium falciparum
atggaatcctatataagggaaagtaaaaagcttacccttaaaagtaataaggggaagaagctactaagatatttagatatatctttaaataataaatcattacatgatagtcatatattagaactagtaaaaatattgaagaagataataaagatagtatataatacatactattgtttaaatattgatttaagtgaaaattatataacatgtataggattaaaaacattgttaaaatatatattaaattataatgagaatataggagtaaatatattaaaattatataaaaatagtataaaagatgatggggcattattaattaagcagcttgtatatatacagaaaatccccatggaagagttacatttatcacataatttaatacaagacaatgcatgcaaagaattattattaagttttgttcaggcaaaaaaggatagcacatatgtatatccaagatatgataaatatcagaatccatataagcatgctcaaatacctgtatggatacgtttagaatataattgtattcataatcctaaagatatattaaaagaagtagaagattgtgcaaagaaaaaaagaggttacaaaagtaatttaattgtatgctcagctttaaaaagtgataaacgatgttgtccatacaaatgcttaaatgcatctattcgtaatactcccattatgcatgtgtatatgtttattcatcaaaaagaaaatattgtgaacggtaaaatgaaagaagagaaaaacgatttcgtttctctggaaggtgtcctagataaaaatgaaaagagcaactttaataatgataagaatgctgatgagaatatgataaaattggatagcagtaaattaggaaataagaataaatttaagaatgaaaatgatgaatttgaagaagaagaagaagaaatagatgttgacgatgttgatgacgttgacgatgttgatgacgttgacgatgttgacgatgttgacgatgttgacgatgatgaagatgatgaagatgatgaggatgacgaagatgatgatgaagatgatgatgaagatgatgatgatgatgaagatgaagatgatgatgatgatgaagatgaagatgatgacgaagatgacgacgatgacgaggattatgacgatgatgatgacgaggattatgacgaagatgaagatgatgatgatgagaattacaatttgaaggataaaaataatttgaaaggttttgaaaataataagaggataaaaggtaacaagaaaggttctgagaaaccatttgttgttaataaagaaatggttgttgaaaataagaataagaatataaataatgaggaggatgaaaaaaatattgataaaaagaaaagtatgaataagaaaaagaggaagaagaagaagaagcgtgtgaataattacaacaataataataacatcaataataataataataataatagtaataataagaagaaaagtaatttggttaaagataagaagaatagtagtaccagtacatgtaataaatttatgaataatactcataatttaaataaaagttttagtaatatagcctctgatatgtataataaggatacaaatatgagttcattaaataccagtgaaaatactttacctttatatataatattggattgttctgctgtattagatatgaaagaattatggaaggataagtcgattttaccatttagttttccaggtttattatatttatataataataaattattgaaggctaatacaattggtaataataatattcatatgaatagtaataataataacaataataataataataataataataacaataataataataataataacaataataataataataataataataataataataataataataataataataatagtagtagtggtaataataatactaataaaccagggaacgataatttcatatgtcttatgtgtagttatgtagcaaatgaattgaaaatggtttgtcaaaagagcgagataataagacaaaaaatgattaacttgaaattaaatatttgggataaactttctgaattaggaattattgaatttttaagtgtgcctaaagattttaaagaaaataaaaagaactttttaaattcttcttttttaacagatgaacagataaagctagctaatgaatattatgatatatcatatgaaaccctacagatgatacaattttctattgtatggtcaacatatatttttaaaattagtaat

SEQ ID NO: 337 - DNA, 2259 bp, Plasmodium falciparum
cagatgatacaattttctattgtatggtcaacatatatttttaaaattagtaataaagagattattatagaaaataataaaaaagaaataaataaatcggatatgaagaaaagtaaaaagacgatttttacagaggttttgtatttaacatcttcttcgaatatttattctttttttgaatatttatatgaacaagatattaattttatattaccattatgtgtaaccgttaatcaaattaataaatatatacaagatgagcacagttatattatagatattttgatgaataatgcgaaagcggataaatatggcaaattacaatttaataaatcattttttcaacagtttataaaagaaaaatattcaaagtatttgtatactaatacaaaggaagaaataataaatgataagaagaaacaaagtaaaagcactttatgcaacaccaaaccgttgtcatgtgatattttagaacaggtgaatgaagaacaacagatgtttaatagtattaagaataaggatggtatattatcatcccaaaataatttacaaaataataatggaagtgaatatttgatagatgatggcatgggaacaatgcggatatcagatgatatgttgaataattcgaatgacataaagaagaagaagaataataataataaaaaattttcatcagtacaacagatggttgataataaatctgtagctcaaccgattctttcacataataataataataataataatgtgaacagtattaataataataacaatagttacgatatttatgatattatatctgtaaaatctttttcaaatgacaatgtaaacaacatgtgtaatgttgataaaatgatgaacgttcataataatatagtatcatcaaagaatatgaaagaagatgaattgttaaaagaacatcatttatatttaaagaaaggaagtgaagttgttcctaataatcaatattataatttaggggaatataataaattaaatttacaaatgttaaatattactgatttagatatattagaaaaacgaacagatataaatgatatatttaataatagtttgtcagaaacaaataaaagtgcaaataacaccaccaccaataataataataataataataatattcataataatattcataataatattcataataatattcataataatggagccgtacgaaccaatcccgtatcttccgaaaatcatcttattcttgataatagaaataataagaaaaaaacagacatgttggaaaatatgttatattgttcaactgttgaaagtaagttaatgggtttgaataaaaataaaatggaagcgaaccttgatatgaataatgataatataaacaatgataatataaacaatgatcatttaaataatgataatattaacaatgtggcaaggggacataccgtggattctgaacttaccacagaagacccagttatacaaaagaaaggagtatgtaaagataaatcaggaacgccatctgataacaaagttagtatatatgaattgttaataaatgcatttaacggtaagaaaaaaaatgtcaccaaaaatgtaaatgaaaaaaataaaaatggagtgaacgaagaaggtgtaggactaatgaatgatgcaaattgtaatacgaacaatatgaataatgtggacaataccaataatgtggataatacggataaattggacaatacggataacttggacaataccaataacgtggacaataccaataacgtggacaataccaataacgtggacaataccaataacatgaacaataacaataacatgaacagggatgataaagaccaatctatacttatgtcacagatcaaattaaagaacgatcatcgaattgaagaagaggaacttcagttgaaaggtaaaacaaatcataaggataatgtaataaatgaaaaaaggaaaagcatggtggaaaagaaaagcattagtctccataaaaatgttaataataatgataatcttgcctttttgaacaaccaacaagatgataatgtaagccacgcaaaccatacaagaagtaccatacacaaaatgagcgtgtttcataacaacaacatgagtaatattccatcaggctgtgcaatgcagaatgatgaagacaatatggttcttcttggtaacgagaatatgctttttaaaaaaggtggtagcataatgaattttggagatgttgataataatacaacttgtgcaatgaataaaaat

SEQ ID NO: 338 - DNA, 2256 bp, Plasmodium falciparum
ataatgaattttggagatgttgataataatacaacttgtgcaatgaataaaaatgagagaaggttaacaaataatatgaagagtggtcataacattattgctgataataaggatgaggagcttttgaatgtggaaaaaataaataatggagaattattacatattggtaagaacatatgttctgaacaattaataaatcaacgtaaagttgttgaatggaaacattcatttgaaaatcacaaagtagatatagtgaacacttctatgttattagaggagttgatattgaatcctacagtatgtaaatatgtaccaggtgaattatataatagaatattaaaatgttatgaaaagttagattttatgataacaaatttgaataatataaatgaggaaatggaaactatgaaaaatgtatataacacagaaggtaataataacaaaaataataataataataataataatgaacatggtgaacataacattgacaatattgttaataaaaatgttaggacaagtttattaaaaaatgataatataaaaacaacaacaaccgaaagaaataatagtataaaccattcgatgaataaaaatgatgtcagtatgatgtatgatgattttaaaaattattgggactcacctcttggaaaaaataatagcataaataatttgatgatgatgaataatagtataaataatattaacagtggttttaattcgatgaatctaacagcaagcgaattaatgaaaagcttatctaacggtatacatttgaatcaaaaaatgaatactttgacatcttccttgcctcatgactttttgttgaataataacatgttgggttctatgacaaataataataataacagcaataataataataataataataatagcaataataataataacagcaataataataataatagcaataataataatataaatttgggtatgactactcctttgaacaatgcaaatataatacagaaccatttaaataattccatgttaaaaaataatatggttaataaaaattccgcacataatttggctagtcacttgaataacaacaacaaagtatctaagaagaagtcgaccctttctacgtacaacaataatatgaatgaaggtaataatagtatgaatttaaatatgaatatgaattcgacaaataatttgaatagttccagtgtgatgatgatgttgatgaatagtgctcagaataattcgatacagaagaaatatattaataataataataataataattataataataatagtaatagtaataataatagtagtaatagtaataataataatgatatgacggtgttattgaataacatgaatgatgtaaggatcaatccaaacgttttattaaataataataatttattttttcaaggtaataattataagaaggatgaatcaaatactgggaataaaatgagcaaggatatgaatgttattaataatgcgcacgcgaatgttgaaataatgaaaaatgataacatgagcaataataacagcagtaataataattttgttgtaggtagagatttgaaggatataaaaactcttaataaaatattattgttaaataatagtaatttgaatagtgtaaagggagtaagtttgaatgaaaaacaattattaaattatattaataataataataataatagtagtagtagtagtaataataatatgagcggaataccatccgtgaactctaatattgatacaaatcttctaacccttttaaacatgacaaaaaataataacaataataataataataataataataataataattatattaataatattggttcgggaattaattccactggcattagtaataaaaaccttatgataaatcatcagaatgcaaaaaataataaccataacaataataataatgataaattcaaaggaaacccttttaatgattttaatggaatagttacttctaataatattaaaaaaatcttaaacaatgaaaataataataataataatttgtatatgatgaataataataaaacacccataaatgatattaatgtcaaatatgtagaagcattaaacagtcaatttaatttcttatcaagagatagtagaaagatagacacggaaaataacgcgattaacatattaaacttttcgaacgatctagaaaaaaaatctaataataccatggtagatatatgtgaaaagaccaacgacaaaaagatataa

SEQ ID NO: 339 - DNA, 1629 bp, Plasmodium falciparum
atgaaattttatagtccttttgttatttgttttattattttaaaagtatgtttaagtaaaaacataaatttaaacgatgaagggaaaaagaaacaaagcggcctaataaatgaaaatgaggatggaaaaaataataaaagtaataataataaaaaagttcaacataataaaattaatcgtaaaggaaataatagtgtaactaaaaaaacggatgaacataaaaatgatggtgatgcggaaaataaaaaaaatggtgaacataaaaatgatggtgatgggaaaaataaaaaaaatggtgaacataaaaatgatggtgatgggaaaaataaaaaaatggatgaacatttgtatgatattgatggggaaaataaaaaaaatggtgaacatttgtatgatgttgatggggaaaataaaaaaaatggtgaacatttgtatgatattgatggggaaaataaaaaaaatggtgaacatttgtatgatattgatggggaaaataaaaaaacggatgaacatttgtatgatgttgatgggggaaaaaataatattcttgaatataataacattgatcaacataatgaatttccagaaagcttagaaaacgataattcttatgataaacttttcgatgatgttgaattaagggatattattcataacgagaaattttttgagaatttaaaaaatgtgaataataacgatgtacataattttttattagtcgataaagaaatggaaagaagaaaggaagaggagaaaaaaaagagtagaaaattagaagaggacgaggaagacgatgaagatgaagaggaagacaatgatgagaaatggaaagaagaaaataaaaataatagtagtagtagtagtagtagtagtagtaataattttaataaaaattatgatatttatgataatagagatctttataattatgacaatcttgtggatattacacaagaagaacatataaatgtccctaatataaacgatgaaattaatgaagggcgtaaacatgataaggaagattttttaatatttgagaaaagattaaatgaagctgaagatagaaatgattcgagtgatggggataataaaatggaagatttaataaataaccattttgacgattcaggtgataatggatcttatgaaaatattcaagtaaaaaaagaattatataataaaaatgaaaagattataaaagggagagataataatctgaatgatggagatattcatatgaataaaaataatacaagtaataaattgaataataataataataataataataatgacaataatatgaatagtgagatgaaatataaaacatttaaagaagagtacgaagaacaaatattaagtaaaccagaatcgataaaatatttttttgaagtaataacagaaatattaatagtaataagattaggtttaatatatagatatacgaattttttaataccttttaagaattttcttatttcaaaaactttagaaaatgtcgaaatggtatgtgttacatttttatctatacataaatttggtagagaaaaatatcctgatatatatggtttttttttgataatcctaattttgtatatattaaaatatgtgtttaaaaaaatgatgtat

SEQ ID NO: 340 - DNA, 1626 bp, Plasmodium falciparum
ttgataatcctaattttgtatatattaaaatatgtgtttaaaaaaatgatgtataaattatattataataaatatggtatgggtaagaaatattctttgaaaaatcaagaaagtgaaaatatgtacatgcagaatttattaaaaaggattttgtataatgtagaaaaaaagaaggtcttatctaactatgaaagtatattacaagatatattagaaaacacagataacttattagtaaatagtaatataataaataaagaaaataaaaatatttatacagatatgatatcgaatattaataatataggagtctttacatatatatctacacaagcattaaaaaaaattaatcataaatcggatttaataattaatgaattaacaaccaatggttttattgatgaagatacaagtaacaaaatggataaactcaaaaacttcgcttccataaatgaatatccttatgtagatattaaaaagtttaaagataatctcgtcaacgaatatgatgagcactttatattaaacgataaaatgagatacagtggatttcatagtatggaaaatgacaagagtcctccgaatgataagtataacatggatagttataatatggatagttataatatggaaaacatgaacatggaaaacatgaacatggataatatgaacatggaaaacatgaacatggataatagcaacatggataatagcaacatggataatatgaacatggataatagcaacatggataatagccacgtggatatgaataacatgaataataataacatgaataataataacatgggtgtacatataaatatgaataacaattatttatctaataaatataaacacaattctgcatatgatgaaaataacgtgcaggactttttacagaaatcaaaaaagcaagattatggacatgtaacgaatacactgaaagatgggaagcaaatgatttataataacatggatccgaataataaaaaagatgataattattttaagaaaatgatgagagattcagacttatcaaattataacggaaggaaaagtatgtatttaaatgaatcattagaagatgacatgaaaaataatgattatgataataagattaataataaaaattttgattatgcaaataataatagcacatatattgtagaaggtaaagaaattcaacaaggtgaaaaaaataaaacaaatgatatggatgaaaaaaaaaaagatgaatcctttattcattatgacaataaaaaaataataaataatttaaaccccttctcccctttgaatgattataataatatttctaataataaaaagaataccataaacgaagaacaaaataataatgtaaatgaatctgatgttataacatacatagcaaattcttatataaataaaccacctagtaatataaatagatttagtcaaacttctatttataatacacataataaggtaaccaaccccttattaaatacacaaagaaatgtaccaaaagaagtaacacaacgtaaaaacacggaagcatctgtaaataataatgtcgaagaaaattatctgagaaacaaggttacgaaccatgatacggaacaaagcgtggagaacaaattg

SEQ ID NO: 341 - DNA, 2289 bp, Plasmodium falciparum
aaatttaatttaaaagatgacacacatcatagtgacgacaaaaaacattcaacagatcacgagaattcaaaaaaacataatatggatcatattaataactctcctatacaagaagaaaaaaataataaaataaaaattgttttaaaagattcaaatgtggtaaacaattttgaagaaaatatgcaacacaggaataaatcggaagaaaaaaaatctaccaaaatgttaaagaaaagaaaacgaaataaaaatgtaattctttttgaagaaaatatttttgataattatttggaaaataaaaagagctgtatgttgaaatgtgagaaaaatgtctttataaccgactgtttttattataaaaatatttttagaaacctgcacgagtttattgatgataaatcgactgaggggaatgatgaaaaaaggagttctcatcaaaatggtacaagttgtgaaaatgttataagtaatgaaaatgtgcataatgatgataatgtaaacaatgatgataatgtaaacaatgatgataatgtaaacaatgatgataatgtaaacaatgatgataataaaaataatgacgataatgtaaacaatgatgatactaaaaataataatataaactctggtgatgtggaacaaaatgatattcgtaacctaaccgaagaaaccaaacctatttacgataataaagaaaatattaaaaaattatggaaagaaaaaatgaccacactttataattatgataatacaaattgtaaaatacacgtatttcattattcaccaaatgaagataaaaataatacatatattacaaatgatgtcaataatgtcaatgaaaattttaaaattcaatctacccaaaaaacaaataatgtgcatgaacaagatggaaatattctgactgttcaggaaaaaacgaaagattttatgaacaagtcatgcaatatttcaaatgatgataaaatatgtatacatataaaaaaaaataataatattccaatgagtaatataccaaaaaatgtgtttaggggtttttcggaagtttatcaagacgaaagttcttcagaagatgaaaataatataaatgaaaagaatataaatgaaaagaatataaatgaaaagaatataaatgaaaagaatataaatgaaaagaatatgaatgtacataaacatgcaacaaatgatcaaataaacgaaagttatgaatgtgcttctttcaacgataccttaaaatgcgacgtggagtatgaaaagaacgtccccgcatactttttaacttatggaaatattattaataatataatttctaacgaagaggagacacatcaagctaatatttctcaaatgaaaaatgaaaataagaattgtaatgtttatgataaggatatgtctcatactcaaatggaaaggaatgtagcgaaaaaaagtgattataataatgagaagaaaaaaaacgaagttatattgaagcatactagtgagggtaatggtaatacttataaggacgataaaaattatgatgataataaaaattatggtgataataaaaattatggtgataataaaaattatggtgataataaatattatgatgataataaaaattatggtgataataaatattatgatgataataaaaattatggtgataataaaaattatggtgataataaaaattatggtgataataaaaattatggtgataataaaaatgatgatgataataaaaattatgatgagaaccttatgaatagtgacgattccattcttttcaacataagtaacaaaaatttttataattttcatttattatttaaaaaggatgagaaattaaaaaaggagttttttttacaaaataggataagcgaaaagaccttattattaaatttgtatgttgattatagtagtatggaagatacatcttttttccgtataaataatacgaatttttataattattattttgatgattatttttatttttttataaaatcatgttatgatttagatttatatataaaaattcagagaaaaaatatcttcttaactgatgaaaagtatttcgaattcttaaaaatacacataatgaataaatctacaaaaaataaaaacgtcccattttatttgtgtaataattctgtagaacaaaataataatttaatacaagttttacaaaagtgttttaaacattttaatttatataatggaaatagttcaagtaccttaactttatatgattctgtaaatgaaatatcttttcttctttcacaaataaggatatatataaag

SEQ ID NO: 342 - DNA, 2139 bp, Plasmodium falciparum
gaagaggtatcagaagataaaggggatattgaagaggtagaaaaagaggagacatcagaagataaaggggatactgaagaagtgagggaagatgaggtatcagaagatatagaagattctgacgaagtaggagaaggcgaagtatcagaagatatagaggattctgaagaagtaggaaaagaggaagaaccttatgagaaaggcgattatgaagaagtaggaaaggaggaagcatcatatgataaaggagatgctgacgaagtatcagaagatatagaggattatgaagaattaggaaaagaggaagaaccttatgagaaaggcgattatgaagaagtaggaaaggaggaagcatcatatgataaaggagatgctgaagaaataggaaaagaggaagcatcagatgataaaggagattctgaagaattagggaaagaggaagaaccttatgagaaaggcgattatgaagaagtaggaaaggaggaagcatcatatgataaaggcgatgctgaagaaataggaaaagaggaagcatcagatgataaaggagattctgaagaagtaggaaaagaggaagcatcagatgataaaggatattctgaagaagtaggaaaagaggaaggatcatatgataaaggagatgctgaagaagtcgaagatgaagacgaagagcatataaggagtaaagaagaagtaaaggaaccagaaataggaactgatatcgaagaagaaaataaagaaaaatatataaaaaaattagatgtgcaagatacgttatatgaaattaatgttttaaatggagaagatataacttcctttttggaaaataaaaataaaattatacaaaatgaaggagaagaagatgatgatgatgatgaagatgatgaggatgatgaagatggtgaagatgggaaaggtgtatatattaatatagttaataatgttcctggtaatatctggaatgatacaatatatgatgataattataataataatacatatagtagtgcagaagaatatattttttatgaaaaaaaattagatgataatacaagaaacaatatgaaaagaagttattatgacattttagatgtaaaagaagattccgatataaatgaaattaaaagaaagttttataatttatctttaaaatattacccaaagatgaataaagataaaaatttagtgatgaatcaaaaatttgagaatataagtgaggcatatcaaatattgggttatgaaaatagacggaaattatatgatttaggagaatatgatgaaacaaataaaatgataattattgatccattaatattttttaatttaatatttacatctgatatgatgtatgaatatactggaaatactcaagtatctacttttgtaaaattattttttgagaaaaatatttctgttgaagatatatcttattatgttggtgagattatgaaagaaatgatggaagggcaaaatataagagaagagaaagtagctgaattattaaaagatagattagatttatatatagataatgaagatgaatggaagaagttaatggaaaatgaaattagcatgttattaaagtcttcattttctagttttatattagagtctataggatggacatatgagaatgtttctaatatttttttagaagaaaaagtaaattctggtaaaaataaaaaaggtatatatttaaaagaagctaatgagagaattattagaaattcaattgttttgagacaatgtaaaagtcgttttatatctataataacaaattattatccttttaaagaacaaaataatccttttataaagcaggcacaatatgtatcctcatctaattatgtattggatgatataataaataatatagactatagtatagataatatacatagagccatagataatttatactatgaacatatattaaatttattagaggaagaaaaaaatgaaatactagaagaaatattaaggaatattctaaaaattattttgtgtgatgttgaaacaacggtaagaagatcagcacaaaaagtattacaaaatgcagaaggagatacaaatttgatgcttaaaagagctaaaggattacaatcattgggtaaaatgatattacagaaggttaattga

SEQ ID NO: 343 - DNA, 1818 bp, Plasmodium falciparum
atgttaaagaaatatattatattaatatatatcggtgtaattctaaatttcataactaaaaataataatgtagtgtctgttcctgagccctttttatcacaaaacaaagattcttttgaagaaaaaaaatatacgtatggggataatttacaattgggggcatcaactataaatacccctaaaacacaatcacaagaaaataaagatataaataaagaaacaaaaaatacaataataaaaaaaacgaataattttccaagtaccttaaatgagaaatttcctcataaaattcaattaaccaataaagaaaataaagaagatgaacaaaataaagaaaataaaaaagatgaacaaaataaagaagatgaacaaaataaacaaaataaagaagatgaacaaaataaacaaaacaaggataaaaaaaatatagtaagtaacaaattatcgggaaacaatgaacaacagaataattctattccaaaatcaatacaaaaaccagagaattgtgtcaaaaaacaaagcaatcaatttcctcgtagttatccagaattctttgaagcaaattttggacccatagatgaacttatggatgaaacggattatagtagtgatgatttagaagatcaactaaattatggttatagaggaatagaacatgatattgatgaaacagattattatataggaagtatattaggatatagtgattttatgaataaaatgaaatatcagaatacacaaattgataataacaaaggaaaaaaaactacaaacactatggaaaaaaacaaaaagaacagagataagaaacattctaaaaaaaggaaaacaaaacaaaattataaatataagaaggaaaaccaaaatatagaaaatcatatacctcaaagtaaatataaacaagaacgaattgaaatattagatgataatggaaaagaattgaaatcccacaaaaatattaaagaagaaaaggggggaatagaaaaaactgatactactaatatagcagatataaaaataaaaaaagaagaaagagaaacaaaagatgaaaaagaaaaaaacattcaacagctagtaaaagatgtacaattaataaaagttggagaagaaacgaaagacgacgaaaaagaagacaaagaaggaacagatgatgaagaagatacagatgatgaagaagatacagatgatgaagaagatacagatgatgaagaagatacaagtgatgaagaaactacaggtgatcaagaaaacaaagaagaaacagaagtagacgaaaaaaaaacagaaaaagccgaagaagaattagaagaagacaaagaagaatcagaaaaagacaaagaagaatcagaaaaagataaagaagaatcagaaaaagataaagaagaatcagaaaaagacaaagaaaaaactgaagaagatgaagaaaaaactgaagacgaaaaaggaacggaagtatacaaaaaagaaacagatgtagatgaaaaaaaagaaaagggagaatatggagagggaacagatgatgaagaagacaaagaaaaagaagaagacgacgaagaaacaaaagtagaagaaaagaaaacagaaaaagacgaagagggaacagattatgaagaagatacagatgattcagacaaagatgaagaaacaaaagtagaagaaaagaaaacagaaagagacgaagaagaaactgaagaagacgaaaaagaaacagaagtagaaaaaaagaaaacagaaaaagacgaagagggaacagattatgaagaagatacagatgattcagacaaagatgtagaaacagaagtagaagaaacagacgca

SEQ ID NO: 344 - DNA, 1815 bp, Plasmodium falciparum
gatacagatgattcagacaaagatgtagaaacagaagtagaagaaacagacgcagaagacaaagaagaaaacgaagagggaacagatgatgaagaagacaaagtagaagaaacagacctagacgaccaagaagaagacggagaagaagataaagaagacgacaaagaaaaagacaaagaagatgacaaagaagatgacaaagaaaaagacaaagaagatgacaaagaaaaatacaaagaagatgacaaagaagatgacaaagaagatgacaaagaaaaagacaaagaagataacaaagaaaaagacaaagaagataacaaagaaaaagacaaagaagatgacaaagaaaaagacaaagaagatgacaaagaaaaagacaaagaagataacaaagaaaaagacaaagaagataacaaagaaaaagacaaagaagatgacaaagaaaaacatgataaacatgtaagaagaataaaaaagaaaatgaaagatgatgactatgatgaaagtttgaaaacgaaaaattattatccacataatatgacatttggacaacaacaatatttcccatactataatccattagaacaacagaattatcaactacatcatattataaaacaacagcaaaattatcacccacatcatattataaaacaacagcaaaatcataatccacatcatattttacaagagcaagaaaaacatcacccacaaggtataccaaaggaacaaccatataataatgttccttatatcttaaaaaaggggcttgaacccaaaactcataaccatgtaaaagaagatcaacctaatattaaacagggtgttgtaaagggacaagaaccacatgttgatgatatgcataacaatacaaaagaacataagaattttaaaaatacaaccgatgtaaaacaaccagcaagtcatatatataataattcatcagaaaaacaaattgaacatgtatataataagtctcctgaaaaacaaattgaacatgtatataataagtctcctgaaaaacaaattgaacatgtatataataattctcctgaaaaacaaattgaacatgtatataataattctcctgaaaaacaaattgaacatgtatataataattctcctgaaaaacaaattgaacatgtatataataattctcctgaaaaacctgcaagacatacaaataatatttcattagaaaaacaaaatagtcataaatataatgttaatatacaagatcgacatgatcctgtatattataaatatgaagatatgttaaaaagagataaagatttgtttacaattatcaacaacatttgtgaactggaatttaattctacaaataactatttaatgaaaataattaataacgacaaattaaaacataattctttaaatgataatgaagccatattaaaagaaataactaaaactcaaaatgaattgttttctttaaaattaccattagaaattaaagtatcaatggctcttcgtataagtgaacgtttacgtgcctttgtttttgataaagatttaacagcttattatataaaaaaattaaaagatatatttaaattagaaacagaggcagcaaaaaattattattattatgtaaaatgtcaaaaaacgtttagtgataaaaaacgtttggttaataatttagattcaataaaattatactatgaatcacaaattaataaaaattttattagcatacccaaagataaaatacctacagctatatatcgtatatccaacttagttaatgatttaatttttttacttccacaatcaaatgcaaacaaagcattataa

SEQ ID NO: 345 - DNA, 2520 bp, Plasmodium falciparum
ctttataataatttatcttcgaacagggattctactgtagatatgcataataaatataatagtgaagaatatataaatatacagagaacaaataaaatatatgaattgagtaataaaagaattagaaattataaattgtatagtatggatgaaatatttaaggtgtctcttaaggaaaaaaaatatatagataatatttctaataatatggaaagagtaacatataaaaatgaaatgataaatgaaaagataagtaagatggacgatatattatatccttgtgacaaaaataaatctttaaacatgtcttgtcctgttataatagaaaataatatatcaagagaagaaaatgaaaaaaattcaagtgttatattaaataaaaaaaagaatgagaatatgtttaattgtgttggaaggttacattgtcacatgggcaaaatgaataatcaagataatatatatgaccaagggaatataaaaaaaaatgaagaagaaataaccaaacatgatgaatatatatcaagggaagaaaaaaataaatataatagtaaatgtattagaaattttgatgactataaatatgaacaagtgttgagttaccatacgttggatgaagacaaaaaaaaaaatgatatgaacaatttaatagatatgaataatgaggcgattattgaaacggtgaatggtgttattaataatattatattggatagaaaagataataacagtaggaaggatatggagaaagagatggagaaggagatggagaagaagatggagaaggagatggagaaggtgatggagaaggagatggagaaggtgatggagaaggaggtggagaaagaattgaaaaatgagatgaacaataggatgaacaataggatgaacaatgagatgaaaaatgaaataaacatttataaaaacaatgagatatatgtagataatgataaagaactagaaattgtaaatgaggagaagaaacttatttacccatttaattacgaatctgatgtacataaaaatatgaatatgtcaattaatataaataattgtaaagatgattataataatatattaaaagaatatgtagataattcatgtcttgctcaaaaggaagagaatatatttcgacctttattcaatttaaataagaaagataaagtatggaaacgttttaatataaagaataatattaagacaataatacataatgaagagatgaaaagaatatatcaaactattaataaaaatgtttttcctatttataattttaatcgatatgaaaattttttaataaatcatttaacatataattttccaaaaaatgatttatttaaattatcatacaaagtaagtatgaataatataaggaatttgtatattgctaataaacatataaataataattatgattatatgaataaattatataatcaaaatatatatacattaaaatatcaggtagctaatatagataatgatcatcatatatgtaagaaagggggagggttggattatataaatatgaatatatcaaaagaatgtaaaaataggaaagacaaaacatatttaaataaaatatttcattataagaagaaaaaggatgcacgcttttttataaatgacgaaattggttctaatgattatatgtatgatataaaaaaaaaatatagtaacgatgaaaataattataaattaaatgaaaagatgaacatatctatgtcaaatgatgaagatatgattcctacgttaaatagtgaacatggaaataattttccaagttgtcaaccgaatttattagaaaaaaaaagtacttatatagatttgaacttatatgatagtaattctatggacgattttacagaagaaaaatataattttgttaataatgaaaatgatttattcaatactaaaagatggaagtttaatttttccaagggtaaaaatctgtttaataataaattttttaatgtatctaatgaggatggtgtgttttctttttttaaaaatatgaatctttttagggaacttaataaatcaaataatagcttaaaactagagagtgttaaaaatagtaataataattgtagtaataataagggtgatgataatattggaaatatggagaatatgaatacaacaaatgttacaattgcgagtgatgaacatatatctacaaagggagatatacacgacgaatcattttctagagacgataatgattgtatccttttaaaaattgaaggtagaagtaaaaaatatagtgatataaccttatataatgaggacaaaagtaatttggagaatgacaatgagactattaatgaatatgaaaatgtatgtagtaacatagatgttaatgaatgggaagataaggtaaatggtacatgtaatagtgttggtgataaagagactgaaaagaataatgaaaagaataatgaaaagaataatgaaaagaataatgaaaagaataatgaaaagaataatgaaaagaataatgaaaagaataatgaaaagaat

SEQ ID NO: 346 - DNA, 2517 bp, Plasmodium falciparum
aagaataatgaaaagaataatgaaaagaataatgaaaagaataatgaaaagaataatgaagaaaataatgaaggaaataatgaagaaaataatgaagaaaataatgaagaaaataatgaagaaaataatgatatagaaaagaatgatataaaggataataattcgggacaagtgaaagaaaatataattgttatgaataatacaaacaatatggatgttgataatgatgataataacaataattacaataatgttagtactgatgaaggtatagatataattaaaaacatcaaaagtgagatgaatgattatatttataatgataatattatgattaagataaataataaaagtatagatcttatgaatataaaaaatcaaaagaatgaaccttttttaaattatacaaatgaaaaggatatacatatgaagagcaattcatcatataatgtaaatgataaaatgaatttatttaataataatgagaaaacagaaaaaaataatactagtttaaacgatttattatataaaagaaaagaagaattagatgatgaaaaaatatctgaatataaggatacaaatttaacaaacaatacctttgaacatatagctaaaaggattaatttaattttgaatgatacaattgaattttttcaaaaacatacatatcttcataatggttatggtaatgttcaggtgtgcaaaaagaacaagaggaaattagaaaaaaagaagttgaaaaaatggtcctgtatttataaaattaataaaattgtacgtaaaggggcccacggggtggtgttttctgcgtggagaagtgagaatgttgatttttttaatcattcgttttttgaaaacttaaatttggagaataaaaagaagggatatatcgatgaaacaaatgttaatgaaaattatgagtctgataatgaatatgatagtgatgaagatgatactgaaagtgataatgatgatgagcaaaataaagagaatgaaagaggtgatgaaaaggatggatatgaagaaatgaatgggggagataagaatgaagaaatgaatgggggagataagaatgaagaaatgaatgtgggagataaaaatggaggaataaatgaggaacataaaaatgaaggaataaatgaggaacataaggatgaactaataaataaggaacataaaaacgagcgaataaatgaggaacataaaaacgaacgaataaatgaggaacataaaaatgaaggaataaatgaggaacataaaaatgaaggaataaatgaggaacataaaaacgaacgaataaatgaggaacataaaaatgaaggaataaataaactgacctatcataatatgaataaaaataatatttcaaatgaaaataattataatgatgacgattcttatgatgaagataatttggtatccctgaagataataaacttaaaatatttaagtaaaaagaatagtttaaaaaacattttgagagaagtaaattttttaaaaatgtgtgaacatccaaatgtagtaaaatatttcgaatcttttttttggcctccttgttatttagttattgtgtgtgaatatttatcaggaggaacattatatgatttatataaaaattatggtagaatatcagaagatcttttagtatatatcttagatgatgtattaaatggtttaaattatttacataatgaatgtagttcaccacttatacatagagatataaaaccaacaaatatcgttctttccaaagatggtatagctaagataattgattttggttcttgtgaagaattgaaaaatagtgatcagtctaaagaattagtgggtactatatattatatatcacctgaaatattgatgagaactaattatgattgttcatctgatatatggtcattgggtattacaatatatgaaattgttttatgtaccttaccatggaaaagaaatcaatcatttgaaaattatataaaaaccataattaattcatcaccaaaaattaacataacagaaggatatagtaaacacttatgttattttgttgagaagtgtttacaaaagaaacctgagaacagaggaaatgtgaaagatttattaaatcataaatttttgattaaaaagaggtatattaaaaagaaacctagttctatatatgaaataagagatatattaaaaatatataatggtaaaggtaaaacaaatatcttccgaaatttttttaagaacctttttttcttcaatgataagaataaaaaaaaaaaaccaaataaaatgatcagttccaaatcctgtgatgcagaaatgttctttgaacagttaaaaagggaaaattttgatttttttgaaattaaattaaaagatgatgaaaatagtagatccttgaatacgtttaatataaatatatctaaagaaagagacgacatatcatattcttctttaaatttggaaaaaatcaaagaacacagtctcaatatggtagcatctgttgtcgggactgaacaatcccagaaatga

SEQ ID NO: 347 - DNA, 2301 bp, Plasmodium falciparum
aatgatattataagagatacgcatgataagtctgatatatttaaaaatattaaaatagataataataaaaaatatgaaatttataatttagagcttgaacaagaagaaattaatgaaaaaaaaaattataataaaaataataatgatagtaacaaaacgttctttttaaaaatagagaatgaatttaaaaaagaccttttattagatgatagccaaatttttggtgatagccttttagctgatataaaagaatataattatactgctgataatttggataataataatgaaaacaaaagtttatatgaagatggcgaaaattttataactaggaatgagcctattacaaatgaatatgaagaaaaaaataacataatatacatatcagatgaacaaaaatataatgaagaagatattatatttaaagacaaaataaaggaaaaagagaaaaacaatgatacatcaagtgatgattttgaaaattgtagtgtacaggaaaaaatatatgtaaatgaaaaaatagaagaatataataataaaaatgatgataaatcatcttcatcatcatcgattatattagaagaaatcaaatataaaaaggaaaaaaaagatgagctcgttagccctaatttgtgtgttctacttgatgaatttgagcattctaatgatctggagaataattatatttccgtttcttctgatgatatgaaaaccaacgtgagcaaaaacaatattacaggagtaaaggaaaataaagtggacaaaacaaatgtggagtatgataaaaaaggagatgatggggtaatagaaatatcttttgaggatagtcataaattagaagagtcaaaatttgatgataataacaatatttatgataatgatgacgaattagaaaaaaatttatcaaaggattatatttcggatgttgataaaaaccatgtaaataatatatataatatcgaacgaggggaagatgaaagagaaaacgaatttgtagagaataaaatacagtcgacagaatcacataagagtaatgaatttatatgtacagaaaataaaagtttgagaaaacaatatatgagtaaagaagatataagtaatgtgcgaatacttaaaagtgatgatattaacaatttgagtaaacaaaattattttgaaatattattagataagaaacaagttatggataattttcagatgaatattgaacaaaataatgataaattaaaagaagataaattagatgaaggtgcttattttgaatatttagaagataataaaataattgattcatatataaaagaaacaaataaagaaaatgaagaattaataaaagaatataaaaagttgaaaaaaaataatattgaaataaatgatgaaatgaatgatgatataaaattattattaaatttttttggtatcccatatatacaatctccatgtgaagcagaagctcaatgttcatatttaaataataaaaattattgtgatgctattattagtgatgattcggatgttttagtttttagtgggaaaacagttataaagaatttttttaataaaaaaaaaacagtcgaagtttatgaaaaaaaagctattgaggaaaagttaggattgtatcaagaagaattaattaatatttccttattatgtggatgtgattatacaataggtgtgcatggtataggtattgttaatgctttagaaataattaaagcctttccaaattttgaggatttaaaaatattaaaagatattgtatcgaacccttttagaaaaatagataaaaatatgtataatgaagaaatacagcaattcttaaatactcataaaaattataaacttaattggatattcccaaataattttcctgatagagaagtctataaatgttttaagtatccaaaggtatgtacagatattaaaaaattcgaatggcatgtccctgatattaagagtataacaaaatttttacataaaactacaaatatatcagaagaaaaagttcttaatgtcctaaacccaattttacaaaaatataatgttaatgttagaacatatcaatcaaaaattgaggacttctttccactcttggagaaaaaaagaaaaactgtagatgatttaattgatcatattagagcaaataataaacaaaagagacaaaaaaataaaaccgttcatttggatagtaaaatatcaccattgattgatataaatccagcaggaattatcaaatctaagagaatgtcatcggccttggatcatataaaaaggagaaaatcaagcaagaaaaaaaaataa

SEQ ID NO: 348 - DNA, 819 bp, Plasmodium falciparum
atgaaggtaattaaaacattgtctattataaatttctttatttttgttacctttaatattaaaaatgaaagtaaatatagcaacacattcataaacaatgcttataatatgagtataaggagaagtatggcagaaagtaagccttctactggtgctggtggtagtgctggtggtagtgctggtggtagtgctggtggtagtgctggtggtagtgctggtggtagtgctggttctggtgatggtaatggtgcagatgctgagggaagttcaagtactcccgctactaccacaactaccaaaactaccacaactaccacaactactaatgatgcagaagcatctaccagtacctcttcagaaaatccaaatcataaaaatgccgaaacaaatccaaaaggtaaaggagaagttcaagaaccaaatcaagcaaataaagaaactcaaaataactcaaatgttcaacaagactctcaaactaaatcaaatgttccacccactcaagatgcagacactaaaagtcctactgcacaacctgaacaagctgaaaattctgctccaacagccgaacaaactgaatcccccgaattacaatctgcaccagagaataaaggtacaggacaacatggacatatgcatggttctagaaataatcatccacaaaatacttctgatagtcaaaaagaatgtaccgatggtaacaaagaaaactgtggagcagcaacatccctcttaaataactctagtaatattgcttcaataaataaatttgttgttttaatttcagcaacacttgttttatcttttgccatattcatataa

SEQ ID NO: 349 - DNA, 516 bp, Plasmodium falciparum
atgaatatattatgtattctatcatatatttattttttcgttattttttatagtttgaatttaaataataaaaatgaaaattttttggttgtcagaagattaatgaatgacgaaaaaggagaaggtggttttacaagtaaaaataaagagaatggaaataataatagaaataatgaaaatgaactaaaagaagaaggttctttacctactaagatgaatgaaaaaaattccaattcatcagataaacagccaaatgatatttcacatgatgaatcaaagagcaattctaataattcacaaaatatccaaaaagaacctgaagaaaaagagaacagtaaccctaatttagatagtagtgaaaattcgagtgaaagcgcaacacgttctgttgatatatcagaacataattctaataatccagagacgaaagaagagaatggagaagaacctttagatcttgaaattaatgagaatgcagaaataggtcaagaacctccaaatagattacattttgac

SEQ ID NO: 350 - DNA, 486 bp, Plasmodium falciparum
atgtggatagttaaatttttaatagtagttcatttttttataatttgtaccataaactttgataaattgtatatcagttattcttataatatagtaccagaaaatggaagaatgttaaatatgagaattctaggggaagaaaaaccaaatgtggacggagtaagtactagtaatactcctggaggaaatgaatcttcaagtgcttcccccaatttatctgacgcagcagaaaaaaaggatgaaaaagaagcttctgaacaaggagaagaaagtcataaaaaagaaaattcccaagaaagcgcgaatggtaaggatgatgttaaagaagaaaaaaaaactaatgaaaaaaaagatgatggaaaaacagacaaggttcaagaaaaggttctagaaaagtctccaaaagaatcccaaatggttgatgataaaaaaaaaactgaagctatccctaaaaaggtagttcaaccaagttcatcaaattcaggt

SEQ ID NO: 351 - DNA, 2157 bp, Plasmodium falciparum
gatacttgtgatgcaattgccactgactgttttttgaatggtaacgttaatattgagaaatgctttcaatgtaccttgctagttcaaaaaaaagataaatcacatgaatgttttaagtacgtatcaagtgaaatgaagaaaaagatgaacgaaataaaagtcaaggcacaagatgatttcaatccgaatgaatataaattaatagaatctattgataatatattgagtaaaatatataaaaaagcaaataaaccttttgaaattagtaaagatttaattaatttagaagatttagattatcaatttaaaaatgaattattagaatattgtaaattattaaaaaaggttgatactagtggaacattagaagaatacgaattaggtaatgcagaagatatatataataatttgactagattgttaaaatctcattctgacgaaaatattgtaactttacaaggaaaacttagaaatacagctatctgtataaagaatgttgatgaatggatattaaataaaagaggtctaacattacctagtgaatcacctagtgaatcatccagtaaatcagatagttatcttaacacttttaatgacaaggataaaaacgaagataaggatgatatgagtaaaaattcgaaggaggagtttaaaaatgatgacaaagaaaattctgatgaccaaaacaataatgattctaataaaaaagatgatgagaataatataaataatggtgatactaattatgtttatgattttgatgatgatgattatgataacaatagttatgagaaagatatgtatgaaagccccataaaggaaaataagaatggtgttattgatttagaaaaatatggtaaccaaataaaattgaaatcaccttattttaaaaatagtaaatattgtaattatgaatattgtaatagatggagagataaaactagttgtatatctcaaatagaagtagaagaacaaggtaattgtggattatgttggatatttgcatctaagttacatttcgaaactattagatgtatgaggggttatggtcatttcagaagttcagcattatatgtagctaattgttctaagagaaaacctatagatagatgtgaagaaggatcgaatccattagaatttttacgaatattagatgaaaagaaatttttacctttagaatctaattatccgtattcatatacaagtgcaggtaattcttgtcctaaattaccaaatagttggacaaatttatggggtgatacaaaattattatttaataaaaaagttcatcgttatataggaaataaaggatttatatcacatgaaacatcttattttaaaaataatatggatttatttatagatatggtaaaaagagaagttcaaaataaaggttcagttattatatatataaagactcaagatgttataggttatgattttaatggtaaaggtgtccatagtatgtgtggtgatagaacacctgaccatgcagctaatattataggttatggtaattatattaataaaaaaggagaaaaacgatcttattggttaattagaaatagttggagttattattggggagatgaaggaaattttagagtagatatgttaggtcctaagaattgtttgtacaattttatacatactgttgtattttttaaactagatttaggtacaatacatgtacctaaaaagaaatcttggaaaaaaaatgtttatttcttaagacataatcctgattttatgtatagtttatattataataattatgaaccagaaacatctcaagattttgaaagtgagaatgattatgacaatgcttttgtacatggacaaagcaatgaatcagatgaaactaataaagaaggaaaaaatgtccacaattctgtggagaaaaaaatacaaatactccatatattaaaacacattaaagattcacaaataaagagagggttagtaaaatatgataatataaatgaaacaaaagatgaacatacatgttcaagagttaattcacaggatgcagaaaaatatgaagaatgtaaaaaattctgtttaaccaagtggaatgaatgtaaagatcattattcaccaggttattgcttgacagatttatacaagggagaagattgtaatttctgttatgtataa

SEQ ID NO: 352 - DNA, 834 bp, Plasmodium falciparum
tgtgttatatttaacaaaaatgttataaaatgtacaggagaaagtcaaacaggtaatacaggaggaggtcaagcaggtaatacaggaggagatcaagcaggtagtacaggaggaagtccacaaggtagtacgggagcaagtccacaaggtagtacgggagcaagtccacaaggtagtacgggagcaagtcaacccggaagttccgaaccaagcaatcctgtaagttccggacattctgtaagtactgtatcagtatcacaaacttcaacttcttcagaaaaacaggatacaattcaagtaaaatcagctttattaaaagattatatgggtttaaaagttactggtccatgtaacgaaaatttcataatgttcttagttcctcatatatatattgatgttgatacagaagatactaatatcgaattaagaacaacattgaaaaaaacaaataatgcaatatcatttgaatcaaacagtggttcattagaaaaaaaaaaatatgtaaaactaccatcaaatggtacaactggtgaacaaggttcaagtacgggaacagttagaggagatacagaaccaatttcagattcaagctcaagttcaagttcaagctctagttcaagttcaagttcaagttcaagttctagttcaagttctagttcaagttcagaaagtcttcctgctaatggacctgattcccctactgttaaaccgccaagaaatttacaaaatatatgtgaaactggaaaaaacttcaagttggtagtatatattaaggagaatacattaatacttaaatggaaagtatacggagaaacaaaagatactactgaaaat

SEQ ID NO: 353 - DNA, 942 bp, Plasmodium falciparum
attagcggtatcatattcatagggagaggactttccgtgttcattatttgccctttacagaattattacataaataaatataattatatgccagattatatgcccgaaatagaaaactccgatgagaaatattttagtaacttagatatattaaataaggtaccttatttgtttatatatgaaggaatatgttttgctattattcagtttttgggttcatatttaattgcagattcaggtgatacatctaaggatttcatggcatataatgataggaataataaagtattatattttgaagaaaaaaattttataaataagccaaatggtttatctaattctttaagaacattatcgaatacatcgaatttttcatttagagaagtaaataatacatttattaatcgtgaatttatattaatatggttaatgatcttttttaattggcaagctatatcatatactcaagtattttggaaaatatttgggatgaattatttatctattgatgatagatcattatcattattaggatctgtatcttctctttttaatatttttggtaggatcttttggggacttataagtgactttacaagttttaaaacaacattaatattaatgagtcttcttatgagctttttaacaatcacattaacaatgtcaggattttatggtattataacttattctatatgggtatgtcttattttcttttgtcatgctggcacttttgcaatattcccatccataactgcccatacatttggaaccaaaaatttcggaccagtttttggactcctatttacagcacgagctttttcaagtataattaatgcaatcatatcagctgtcttgttaaataatattggtaatattgcaatgtgtgcaattgtttccttatcatcctttgtcagcatcatgttagcactagcattttaa

SEQ ID NO: 354 - DNA, 552 bp, Plasmodium falciparum
tggcagagttatccatttttaaagaagaatatgcccaaggttgatattttttcagaagaacatatttcaaagtgtgctttaagcgtttttgataaagagaaaggtaactggtttgtaatagacgctacaaataaaagtgtaggaagtttagctgcatgcattagtaaattattacaaggaaaatatagagttgattacaatcctaataaagttaatagtagtagtgttattgttgtaaatgctatacatgtgaagttttatggacatacatgggataccaaaatttataaattcccaagaaaaagtcattcaaaaagtcataaaattttatcatgtaaaacagtctttgctagaaacccatccatgattttaaatctagctgttaagagaatgctacccaataacagacttaggcaaatcttttatagaaaattatatgtatatccaggagccctacatccacattggggtataccacaagttgtagtacccaaaaaaaatgtagtcaaaaaggaagagcagcaagatataaagacctttaccattttgtaa

SEQ ID NO: 355 - DNA, 2268 bp, Plasmodium falciparum
tctgatataaacaagagttggaaaaaaaatacgtatgtagataagaaattgaataaactatttaacagaagtttaggagaatctcaagtaaatggtgaattagctagtgaagaagtaaaggaaaaaattcttgacttattagaagaaggaaatacattaactgaaagtgtagatgataataaaaatttagaagaagccgaagatataaaggaaaatatcttattaagtaatatagaagaaccaaaagaaaatattattgacaatttattaaataatattggacaaaattcagaaaaacaagaaagtgtatcagaaaatgtacaagtcagtgatgaactttttaatgaattattaaatagtgtagatgttaatggagaagtaaaagaaaatattttggaggaaagtcaagttaatgacgatatttttaatagtttagtaaaaagtgttcaacaagaacaacaacacaatgttgaagaaaaagttgaagaaagtgtagaagaaaatgacgaagaaagtgtagaagaaaatgtagaagaaaatgtagaagaaaatgacgacgaaagtgtagcctcaagtgttgaagaaagtatagcttcaagtgttgatgaaagtatagattcaagtattgaagaaaatgtagctccaactgttgaagaaatcgtagctccaactgttgaagaaattgtagctccaagtgttgtagaaagtgtggctccaagtgttgaagaaagtgtagaagaaaatgttgaagaaagtgtagctgaaaatgttgaagaaagtgtagctgaaaatgttgaagaaagtgtagctgaaaatgttgaagaaagtgtagctgaaaatgttgaagaaagtgtagctgaaaatgttgaagaaagtgtagctgaaaatgttgaagaaatcgtagctccaactgttgaagaaagtgtagctccaactgttgaagaaattgtagctccaagtgttgaagaaagtgtagctccaagtgttgaagaaattgtagttccaactgttgaagaaagtgtagctgaaaatgttgaagaaatcgtagctccaagtgttgaagaaatcgtagctccaagtgttgaagaaatcgtagctccaactgttgaagaaagtgtagctccaactgttgaagaaattgtagctccaagtgttgaagaaagtgtagctccaagtgttgaagaaattgtagttccaactgttgaagaaagtgtagctgaaaatgttgaagaaagtgtagctgaaaatgttgaagaaatcgtagctccaagtgttgaagaaatcgtagctccaagtgttgaagaaatcgtagctccaagtgttgaagaaatcgtagctccaagtgttgaagaaatcgtagctccaagtgttgaagaaatcgtagctccaagtgttgaagaaatcgtagctccaagtgttgaagaaatcgtagctccaagtgttgaagaaatcgtagctccaacagttgaagaaatcgtagctccaacagttgaagaaattgtagctccaagtgttgaagaaatcgtagctccaactgttgaagaaagtgttgctgaaaacgttgcaacaaatttatcagacaatcttttaagtaatttattaggtggtatcgaaactgaggaaataaaggacagtatattaaatgagatagaagaagtaaaagaaaatgtagtcaccacaatactagaaaacgtagaagaaactacagctgaaagtgtaactacttttagtaacatattagaggagatacaagaaaatactattactaatgatactatagaggaaaaattagaagaactccacgaaaatgtattaagtgccgctttagaaaatacccaaagtgaagaggaaaagaaagaagtaatagatgtaattgaagaagtaaaagaagaggtcgctaccactttaatagaaactgtggaacaggcagaagaagagagcgcaagtacaattacggaaatatttgaaaatttagaagaaaatgcagtagaaagtaatgaaaatgttgcagagaatttagagaaattaaacgaaactgtatttaatactgtattagataaagtagaggaaacagtagaaattagcggagaaagtttagaaaacaatgaaatggataaagcattttttagtgaaatatttgataatgtaaaaggaatacaagaaaatttattaacaggtatgtttcgaagtatagaaaccagtatagtaatccaatcagaagaaaaggttgatttgaatgaaaatgtggttagttcgattttagataat

SEQ ID NO: 356 - DNA, 2265 bp, Plasmodium falciparum
tcagaagaaaaggttgatttgaatgaaaatgtggttagttcgattttagataatatagaaaatatgaaagaaggtttattaaataaattagaaaatatttcaagtactgaaggtgttcaagaaactgtaactgaacatgtagaacaaaatgtatatgtggatgttgatgttcctgctatgaaagatcaatttttaggaatattaaatgaggcaggagggttgaaagaaatgttttttaatttggaagatgtatttaaaagtgaaagtgatgtaattactgtagaagaaattaaggatgaaccggttcaaaaagaggtagaaaaagaaactgttagtattattgaagaaatggaagaaaatattgtagatgtattagaggaagaaaaagaagatttaacagacaagatgatagatgcagtagaagaatccatagaaatatcttcagattctaaagaagaaactgaatctattaaagataaagaaaaagatgtttcactagttgttgaagaagttcaagacaatgatatggatgaaagtgttgagaaagttttagaattgaaaaatatggaagaggagttaatgaaggatgctgttgaaataaatgacattactagcaaacttattgaagaaactcaagagttaaatgaagtagaagcagatttaataaaagatatggaaaaattaaaagaattagagaaagcattatcagaagattctaaagaaataatagatgcaaaagatgatacattagaaaaagttattgaagaggaacatgatataacgacgacgttggatgaagttgtagaattaaaagatgtcgaagaagacaagatcgaaaaagtatctgatttaaaagatcttgaagaagatatattaaaagaagtaaaagaaatcaaagaacttgaaagtgaaattttagaagattataaagaattaaaaactattgaaacagatattttagaagagaaaaaagaaatagaaaaagatcattttgaaaaattcgaagaagaagctgaagaaataaaagatcttgaagcagatatattaaaagaagtatcttcattagaagttgaagaagaaaaaaaattagaagaagtacacgaattaaaagaagaggtagaacatataataagtggtgatgcgcatataaaaggtttggaagaagatgatttagaagaagtagatgatttaaaaggaagtatattagacatgttaaagggagatatggaattaggggatatggataaggaaagtttagaagatgtaacagcaaaacttggagaaagagttgaatccttaaaagatgttttatctagtgcattaggcatggatgaagaacaaatgaaaacaagaaaaaaagctcaaagacctaaattggaagaagtattattaaaagaagaggttaaagaagaaccaaagaaaaaaataacaaaaaagaaagtaaggtttgatattaaggataaggaaccaaaagatgaaatagtagaagttgaaatgaaagatgaagatatagatgaagatatagaagaagatgtagaagaagatatagaagaagataaagttgaagatatagatgaagatatagatgaagatatagatgaagatataggtgaagacaaagatgaagttatagatttaatagtccaaaaagagaaacgcattgaaaaggttaaagagaaaaagaaaaaattagaaaaaaaagttgaagaaggtgttagtggtcttaaaaaacacgtagacgaagtaatgaaatatgttcaaaaaattgataaagaagttgataaagaagtatctaaagctttagaatcaaaaaatgatgttactaatgttttaaaacaaaatcaagatttttttagtaaagttaaaaacttcgtaaaaaaatataaagtatttgctgcaccattcatatctgccgttgcagcatttgcatcatatgtagttgggttctttacattttctttattttcatcatgtgtaacaatagcttcttcaacttacttattatcaaaagttgacaaaactataaataaaaataaggagagaccgttttattcatttgtatttgatatctttaagaatttaaaacattatttacaacaaatgaaagaaaaatttagtaaagaaaaaaataataatgtaatagaagtaacaaacaaagctgagaaaaaaggtaatgtacaggtaacaaataaaaccgagaaaacaactaaagttgataaaaataataaagtaccgaaaaaaagtagaacgcaaaaatcaaaataa

SEQ ID NO: 357 - DNA, 771 bp, Plasmodium falciparum
aaatcatattatgtatataaaaaagacggaagaagaaataaaggaaagaaaatattaggtataagaattaataaatccttagccgaaatggatcatacaaaatatcacccagaatattatgatgaagttcaagaaaattatgacccttattatggagttaatcaatatagtgatgaatgtgaatcatacaaatccgaagatgatgattctgaagaagaatattataatagtacgcctcgtgtgactgtgttggaaccccaaacggagaatagtgaagatgaggaaaattatgaaaagactattgtagatgaacttaatgaattaccaaatgataaaaaagctttaatattatcttatataagaaatggaaatgataataatatgcaattattaccgtatgcaaataataataaacaaaatacccaagaaaatatatctcgtaataaagagttctttagacattttgtggatttcattaagggatataaactttttgattcacctgttttaaatgcattactaccctttatatttatagcttttgtatattgtacaatcacaatgttagtaggtaacgtacgttatattatagcactttatatattagcaaaaatattaaaaatgcattatgactacaaacataaagagaataataataataataacaacaataataataataacaacaataataataacaacaacaataataataataacaacaataataataacaacaacaataataataaaaaatcaaaaaaaaattag

SEQ ID NO: 358 - DNA, 768 bp, Plasmodium falciparum
gaattagagaaattaatgaaaagtggcactttagaaaaaatgaaaaaatctctcacctttttagtacatgtgaattcatttttacaattagattttttccatcaattaaatgaaccacctcttggattacctcgatcatatccattatcgttagttctcgaacataaatttaaagaatggatggacagttcgccagcaggtttctatttttcaaattatcaaaatccatatatcagaaaagatttgcatgataaagttttatcacaaaaatttgaaccacctaaaatgaatcagtggaacaaagttttgaaatcattaattgaatgcgcatatgatatgtattttgaacagagacatgttaaaaatttatataaatatcataacatttataatataaataacaaattaatgttaatgcgagattcaatcgatttgtataaaaacaattttgacgatgtgttattttttgcggatatatttaatatgagaaaatatatgacagctacaccagtatataaaaaagtaaaagaccgagtgtaccatacattgcatagtattacaggaaattctgtcaatttttataaatatggtattatatatggatttaaagtaaacaaagaaatattaaaagaagttgtcgatgaattgtattccatctataattttaacaccgacatatttacggatacttcctttttacaaaccgtttatttattatttagaagaatagaagaaacctataggacccaaagaagagatgataaaatt

SEQ ID NO: 359 - DNA, 858 bp, Plasmodium falciparum
atggtttcattttttaaaactccaatctttattttaattatctttttatacttaaatgaaaaggtaatatgttcaataaatgaaaatcaaaatgaaaatgataccattagtcaaaatgtcaaccaacatgaaaatattaatcaaaatgtaaatgataatgacaatattgaacaattaaaatccatgattggaaatgatgaactacataagaatttaacaatattagaaaaattaattttagagtctttagaaaaagataaattaaaatatcctctccttaaacaaggaactgaacaattgatagatatatcaaaatttaataaaaaaaatattacagatgcggatgatgaaacgtacatcatacccaccgtccaatcaacgtttcacgatattgtgaaatacgaacatcttataaaagaacaatcaatagaaatttacaattctgatatatcagataaaattaagaaaaaaatttttatagtaagaacattgaaaaccataaaattaatgcttataccattaaactcgtacaaacaaaataatgacttgaaatctgcactcgaagaattaaataatgtatttacaaacaaagaagctcaagaggaaagcagtccaataggcgaccatgggacattctttagaaaattgttaacacatgttagaacaattaaagaaaatgaagatatagaaaataaaggagaaacacttatattaggcgataataaaatagatgtaatgaattcaaacgatttcttttttacaaccaactcaaatgtaaaatttatggaaaatttagatgatataacaaatcaatatggattaggtttgattaatcatctaggtcctcatttaatagcc

SEQ ID NO: 360 - DNA, 768 bp, Plasmodium falciparum
gaattggagaaattaatgaaaagtggcactttagaaaaaatgaaaaaatctctcacctttttagtacatgtgaattcatttttacaattagattttttccatcaattaaatgaaccacctcttggattacctcgatcatatccattatcgttagttctcgaacataaatttaaagaatggatgaacagttcgccagcaggtttctatttttcaaattatcaaaatccatatatcagaaaagatttgcatgataaagttttatcacaaaaatttgaaccacctaaaatgaatcagtggaacaaagttttgaaatcattaattgaatgcgcatatgatatgtattttgaacagagacatgttaaaaatttatataaatatcataacatttataatataaataacaaattaatgttaatgcgagattcaatcgatttgtataaaaacaattttgacgatgtgttattttttgcggatatatttaatatgagaaaatatatgacagctacaccagtatataaaaaagtaaaagacagagtgtaccatacattgcatagtattacaggaaattctgtcaatttttataaatatggtattatatatggatttaaagtaaacaaagaaatattaaaagaagttgtcgatgaattgtattccatctataattttaacaccgacatatttacggatacttcctttttacaaaccgtttatttattatttagaagaatagaagaaacctataggacccaaagaagagatgataaaatt

SEQ ID NO: 361 - DNA, 1260 bp, Plasmodium falciparum
atgtctataagaaatagagataagaattatatgagtcatgttaatgcgggtaaacatagtatgaataaagtatcaaataataatagtaatagtaatataagtaataataattattctttagggttatatattgataatccacagaaagcatttttatttgatgaaaatgatttaaaagaattattttcttattataaaggagcacatgatataaggatattagctgataaagcagcagctcaaataacatttaatgataaaaatatgatacaacaagtaaagaaagatataaatggattaactattaatgatattggtactataagatgtataatattaaatgaggggaaagtaattgaacaatttttacctttctcagcaaatgatccaaatgttacatcagaaaatgataatactgtttcaaataatgagagtactgtaaatatgttaaagaaattatcaagtttgataaatacaaacaataataataataataataataatataaatagtattaatataaataatattaataatgtaaatagtaataatggtaacaagaaatgggatatgaataatagaattaataatataaataataataatataaataataataataatattagtaataataataattttaaccaattaacaaataataataaaaatgaacaaaatgataattcttttgccaataaaaagctgagcagaattgaacttattgatatttttggatttcctaatgaatttgatgtaatgaataaaatactaggtaaaaataattcaaatataaattatattaacgaacaaacaaataatatggtaaatatcgaattaaaaggaaaaccaattaatgaagctccagtagttgaaagaatgcatttgtctataacatctgataatttgaatgcatataaaaaagccatcgatttgattatgaaattattaaattcgctttttcaagaatttgtagatttttgtcttgaaaataattttgttttaccagaaaatttgtcttttaaaagacatgaatatatgtataattcagatggttctacgaaatatttaggttttaaggaaaataattatggggaaaaagaaatctacaaaaatgatttttcttataataagaaaaataaaaacatgccaaaaagtgataacgataaaaggaataacaacaataataatagttcatttaatatgaatataaatggtgcatatggtaataaccaaaatgtaaaaaatggtagattctaa

SEQ ID NO: 362 - DNA, 1194 bp, Plasmodium falciparum
atgatgagaaaattagctattttatctgtttcttcctttttatttgttgaggccttattccaggaataccagtgctatggaagttcgtcaaacacaagggttctaaatgaattaaattatgataatgcaggcactaatttatataatgaattagaaatgaattattatgggaaacaggaaaattggtatagtcttaaaaaaaatagtagatcacttggagaaaatgatgatggaaataacgaagacaacgagaaattaaggaaaccaaaacataaaaaattaaagcaaccagcggatggtaatcctgatccaaatgcaaacccaaatgtagatcccaatgccaacccaaatgtagatccaaatgcaaacccaaatgtagatccaaatgcaaacccaaatgcaaacccaaatgcaaacccaaatgcaaacccaaatgcaaacccaaatgcaaacccaaatgcaaacccaaatgcaaacccaaatgcaaacccaaatgcaaacccaaatgcaaacccaaatgcaaacccaaatgcaaacccaaatgcaaaccccaatgcaaatcctaatgcaaacccaaatgcaaacccaaacgtagatcctaatgcaaatccaaatgcaaacccaaacgcaaaccccaatgcaaatcctaatgcaaaccccaatgcaaatcctaatgcaaatcctaatgccaatccaaatgcaaatccaaatgcaaacccaaacgcaaaccccaatgcaaatcctaatgccaatccaaatgcaaatccaaatgcaaacccaaatgcaaacccaaatgcaaaccccaatgcaaatcctaataaaaacaatcaaggtaatggacaaggtcacaatatgccaaatgacccaaaccgaaatgtagatgaaaatgctaatgccaacagtgctgtaaaaaataataataacgaagaaccaagtgataagcacataaaagaatatttaaacaaaatacaaaattctctttcaactgaatggtccccatgtagtgtaacttgtggaaatggtattcaagttagaataaagcctggctctgctaataaacctaaagacgaattagattatgcaaatgatattgaaaaaaaaatttgtaaaatggaaaaatgttccagtgtgtttaatgtcgtaaatagttcaataggattaataatggtattatccttcttgttccttaattag

SEQ ID NO: 363 - DNA, 2559 bp, Plasmodium falciparum
ctattgaatgaatacaatacaattgacgaccctgataatctaaataataatattaataggaataggaatatatatatgcataaaaatcgaattagcaatgaacaaaataataaattcaatcttaataataatgaactggaggcagacgaaaaaaaaaataaaatggataacatgttttataataaagagagaaattatttaataaataatcaagaatataataaaaattatatttatagaaatgaatattataaaaacgaaaaaaatgtatatcttgatagttatccctacgaaatggttgaacacaaaaacaaatacacatctaacatgaataatcaatatgataataaagattcttcttatttatatgatgatgtttcttcatcttttaataataaaaaatatactaaattaataataaaggataatttgtgtaacaataaatataaacataataattatgataatcataataatattgatggaaatgatgtatattacaaacatccttatggtatagaagaaggaagggcatatgataaaaattattatcatgataatgaattaaatgatcaccatttaaattataatgataactacatgaatacaaaagttaatatacatgaagatcataataataatatggatgataaaaatatatcatataataatatgaacctgacggatgaaaataataataataataatgataataataatgaaaaatataatgatgacaataataataataataatagatatcatgtaatgaatcaaagaaatatatatccaaacaatatccctatgaaccatgttggagatataaatgaagataaaaataattataatatgtcagataaacaaaatatcccatctattgatgagaaacgagaagaaaattcaagaaattttataaacgaaaccaataaagatgataaggaaaatgtaaataatatgaataatttaaatatggtcaataataatatgaaaaattttatagtaccaaatatgaatggaatggttcttcaaaatacaagtgtgccagctaatgtggtaccagctaatgtggtaccagctaatgtggtacctgctaatgtggtaccagctaatgtgataccagctaatgtggtaccagctaatgtggtacccgctaatgtggtaccttctaatgtggtacccgctaatgtggcacctgctaatgtggtacctgctaatgtggtaccagctaatgtggtacctgctaatgtggtacccgctaatgtggtacccgctaatgtggtacctgctaatattattcctgcaaatattgtccctacaaatatagtgccaaatgtacccattacaaataataatattcaaaataataataacttggaaaacatcaacaaaactaatgataacccagcaccacctgttaaaagaaaaaggggacgacctaaaatgaaaaaaaacacaccggaagaaacacaacctactgatttggctagtaacagtaatgcttcttcatcatatcaagctactaatacaaatattcaaaatatgaatctaaataatttgaatcataatctcgtaaatgatatgaatcaacctttatatactaatcttaatacaattatcaatcccccatttaataatcaactagccaatgctgttataaatcttcctttagatcagcaggttgtacaaccattaggacaacaagtggggcaaccccttggtcaggcaataaattatcaggtaattcccccacctcagacaataggacaacagctagctgaaccgatcaaccagcaattgaatcatcagctaagtcaacaaatgaatcagcaaatgaatcaacaaatgaatcaacagataagtcatcaaatgaatgctcagttagatcaacaaatgaatcatcaaatgaatcatcaaatgagccatcaaatgaatcagcaattaaaccatcaaatgaatcagcaattaaaccatcaaatgaatcaacaactaaatcaacaattaaatcaacaattaaatcaacaattaaatcaacaactgaatcaacctttaagtatgaccatgaatcaaccattcaatcatcctgctttatataataatacaaataagccattgaatccttccttatacgtagtatctaatatgatgaacaataattataatggaaacttgacggaagagcaaatgggaccaatgtttaataatcatgataacgaacaaggaaataatttggatccaaacttttattatagaaatatggaacaaacgaaaagtcaaaacgatgatttttcttatgaagatgaagaagagatgaaccgaaataataaaaagaatacaagatcctctgtaagtgaatcagaaggacaacattctgagaaagaatttccaaaaattcataaaagaaggggaagaagaagaaaaaaagatattgagcagtattctaatgaatttaaacaaaataataatcaagataatataaatcaggatactagagaggagaataaaagtgatcctggatattcaacttttattgatgaaaataataagacagtttcatacaga

SEQ ID NO: 364 - DNA, 2775 bp, Plasmodium falciparum
atggatggtgatatatcaaggaagagttatgtagaaatattaaaatattacagtaaagatgagaataaattaggaggacataattttgggaagaataaaaaaaaggatttaaataaatatgatatatattataaagattatttatatgattactataaagaatgtaataataatattaataataatagtagtagttattataataaattcaatacagaatatacagattgtttaaaaacagataattcatttttcatgacaactttaagtaatttaaaaaaagataatgatgataatgatgtagattgtattaacaaaggtggtagttatagtagtaataataataataataatttttgcttaaatgttgaaatgttgttttcttttttattttgtaaaaagaagaattatttttataatataaaaaataaatatttcaatgaaaaattttatcaaaccaataataatattaagaagaaaagaaagaaaaaaaaaaaaaaaaaaaaaaaaaaggaaaaaaaaaatgtacatgaagataaacaaatatatgatgaatatgatgatgaagaagaaaataaaaataaatttttatataatataaaaaaatatcaaaaaaaaaaaaaatattatattaataaagaatattattatgttaaaaattattatcatgatataaagaaaaatattaaattagataaacaaaaaaataataatacatgtactatatgctttattaataataataataaatatatagaaagatgtacattatgctttgtacattttcatgtatattgttataaaacatattgtgatgattttaatttgaataattttatttgtgatttttgtaaatataatataaaacataatcatatatataatgaaaacaaatataaccaaacaattcataaaacaaataataataattatagatataattgttttatacaaaaaaaaaaaaaaaattcttatatgaatcaagattcccttttttcaaattatatagacagctcacatgaaaacgattataaaaaatattcttttgcctatccatataattataatatgaataaacaaaatgatgatgaaaattctaaagcttgtcaaaatatgaattcctatgatgatgaccaacatgtgtgtcatttaaaaagaagaataaaaaataaacataaatggttttgtaaaaaaaaaaatgtatttgaatatttcacggatcatgattttattagcacaagggaatatcttaataaagaagggggtgatgagaaaaaaaataaaagaaaaagaaaatatataaaatataacacaaaagggaatacaaaagggaatacaaaagggaacacacaagagaacatacaaaataacacacaagagaacatacaagaaaacatacaaaataacacacaaaataacacacaaaataacacacaaaataacacacaaaataacacacaaaataacacacaaggaaacattaaggataacattatatatcacatgaatgatcttattaataaccacattagcgataatacacccaatcacatatacaatgtacagaataaagaacatccgttttgtagtgagtacattcccatgtatgataatgaatacttttccgaaacaatttataataataataacacacatttaaacaaatgttgtaatatataccaagaggaagaaaatatgattaatagttttcttttaaaaaaatctagttttaataaatattgtgataaatcaaataattcactaaaaagaaagtttacagatttatcgaaagataaggagaaaagaatattttgtatgatatgtaaaaatatgaatacaaatgttcttatgaaaaagaaaggaaaggatgagtggtaccatgtgtgttgtttatattataataatattacaagaaataattgtatatatcatatatatgtagagcatttcttttttaatcattataatgaggattattttgtaaatatgtttggaagtttaaaatatattaatgaaattataataaaaaaaataaaagatgaattattaaaaaattataatattctcgcacatagtcatttctttaattttcttatgaatccttattattataatttaacatttaaacaaatcaaaaatttaatcttttcaaattttattttaaataataatacattgtattcgaattatcagtctttatcataccagtccttaaatcaaacacgtagaaagagaatagaggaaagtagaagcatctcccaagggaatcataatgaaatatatggagcaagcataaagtgtgcgcaaaacggtgtacgtgataataagttggatgggaatcacgacaatgataagaaggatgataataaaaaggatggtgataagaaggatgataataaaaaggatggtgataagaaggatgatgataaaaagggtgatgataaatatgatgatggtgatgataaatatgatgatgatgataacaaatatgatgatgatgatgacatatatgacgatgatgatgattttaatttcgatcatgacagcgaaacgtcgaaaagattatcaaattacgattcccttttaaaagataagaaaaaaggatccatattaaaaaaagaagatacattgaagtgttctaaaatgataaatgtacaagaaaaagaaaaatcatcaaaaatgtattgcatgaatactaataattgtaatgtcgttaaggaaaagaattattttgtaaatgattatatgcatatcataaacaatcttagtgatcat

SEQ ID NO: 365 - DNA, 2775 bp, Plasmodium falciparum
attttaaacaacttgggtctttatacttataatttaaaaaataataataataataacgtatatatgaagacaataaaattaacgttatgttgtacacatagtaatgagcatgatacgaaagctgttatgaatattaaattaaatactttgaacaataaaaaatataataatataaattgtattttttatcattattataactcctttttacattccttattttattcagatgaatatattgagcttataagaaaggaggaacgtaaagaagatattgaaaaggaaaaaataaaaagaggcaaatattgtcatcaagaagatagggatgataacatgaataataatgataataatgataacaataataataatgataacaataataataatgataacaataataataatgataacaataataatgataacaataataatgataataataattcgggtgaagaccaattaataaatgaggataacaaaaaaagaaaaataaataatttatcgacccatgaacatacacacaatatgagtgatcataataaagaacccaagaaaaaaaaaaacaaatcaaatgagacacagataaatgatgatactaataaaaaggaaactcataaaaatgaaatagatcataaagaacaaaaagatacaaattgtgataatggaatagaagaaaaaaaagaccaagtatctaaaagtaataatattataagtaaggtgtttcatttttttgaaaggaaaaataataatattaaaaaagatgagcataaaaaggaatacaatgaaagaaatgataagatgagtgaatgtgatatgttattacaaaataaaagagataatgatcataataataataataataacaataatgatgatgataataataataataacaacaatgatgatgataataataataataacaacaataatgatgatcataataataataacaacaataatgatgatgataataataacaacaacaataatgatgatgataataataaagatcccacattagatggagaaactcgttcttatattgatgaaataaatcaaaaagaaataaatatattttctaaatatatagataaaataattgaaaatgttgaaacgaaatgtattatgaaaaataacgtttgtgatggtatttattatttaattagacaagaaaatggtttgaatatttgtcagaaagttaataacaatataataaaaaacaaaatgaagcaagaaaagttttataaaaaaaaaaaacaaaataaaaataatcacaagaacaagaacaagaacaagtacaattatgatataaatatttttaataatgttcctgtggatatacaaaaaagaaattatataaatactaatattataaacattaataataataataataataatagtaatagtaatcatagtaatcataataataatagtaatcatataaacctaagtgatttaaaaaaaaaaattaatattaataaatatacatacttattctatcgtcttcctttatttttatttggagataaatatattaacgatatagatgatgtcaaaagcatttatatgattaaaaatttttttaatcaatataatgatgttacaaacacatccaataatattttgtatgttatagatttattaaaaaaatataataccaaccataatattttaaaaaaaaataatatgatccagtcaccaaagaattatatttgtgaaaaagaagaacaatctaacgatcctgcaaaaaatactcatgtaccttttaatcataatgcactggacacatcacacccaccagtggatacaacaaatacaaatttgttgagtgatgttaatatagaaacaaatgaaatacaggagcacataaataataacatccgtaatgatcataataatgtaataaacaaccaacaaatggaacctaaaaataataatactcctaatgaggaaaagattattttagaatcgacaacgcaaaggagtgaacaaagaatggaagaccgtgatgaggaagatggtaaaagtggagaagatactcgtttggtagatgtagaaacgaaagtggtagatgtagaaacgaaagtggtagatgtagaaacgaaagtggtagatgtagaaacgaaagtggtagatgtagaaacgaaagtggtagatgtagaaacgaaagtgacagatgtagaaacgaaagttacagatgtagaccacaaaatggtagatgtagaaacgaaagtgacagatgtagaccacaaagtggtagatgtagaccacaaagtggtagatgtagaccacaaaatggtagatgtagaccacaaaatggtagatgtagaccacaaaatggtagatgtagaccacaaaatggtagatgtagaccacaaaatggtagatgtagaccacaaaatggtagatgtagaccacaaaatggtagatgtagaccacaaagtggtagatgtagaccacaatgtggtagatgtccaaactatagatgcaccaaataggaagcctataattgacgattgcatgaaaataaaaaaaatgaaaaagaagaaaaaaagcgaaacgcttgttcaagagaacgagttgtcttgttaccctaataagaatgtaaatgtaatattttctttatttgacaacggtaacaattgttatttgttaatatatgaatccgagaaagataataagaagaagagtggtaaaaataaagcactaaaaacaaagaaggattataataatatagattatttttttaaggatttatatcac

SEQ ID NO: 366 - DNA, 1749 bp, Plasmodium falciparum
atgcaaaataataaaagaatggataattataattgtagaagttttaaaaaggaagaatattataaaaattattactataaccaggatcattatatgaacaataacaataataatttatacaataaatataattcatatgatgaggaatatacatataacaaaagtagtaataaaaagaatttattatttaattattataacaaagaaagtattggacataaaaaaaaaaaagcgagttttgtaaaagcacaatatgctaataataggataccatctaataatacaaaattaaataatatgcgtgacaaaattaattataataaaatggattatgattatattttaacaaaaaagaaaaaaaaaagaacaagcattgaaaaaaataataaacataatgacatgataggagatgtttattacaaaattgcttattatttaaaaaaaaatagaaaatatatgcaaagaatattaaaaaaaaattatgtcattaaaatttatttagtgagacatatggaagctttacataatacagaagtaataaaaaattcaacgatatctagagatatgatttatagaaataaagatttttttgattgcccagctagtgaagaggggaaaattaagtgtgaacaactcaaatcgaaagataataaactttatcaaaaacttatcaagttgtataatgaatctgttcatggtaaggatgaacaaacaggtgacattaacacgaaccatcaaaaatataacactaaaaatataaataataatcacaataataataataataataacaataataataatcacaataataataatcacaataataataatcacaataataataatcacaataataataatcacaataataataatcataatatttatagtaatagtctacataataatcaaagttataataatcttcgcattaatgaacatgccaaaggagccttcgaaaaaaataacaattttgttattattacttcacctttaagaagatgtcttgaaacaacaaaatatttcctgaattttaaaaaaaatattattgtttatgaagctgtcagagaaactgcaggaaactattatagtgatcaaagatcaaaaacgtcagatattaaaaaattctgtgatcagaattttgaagattacgaacttatttgctttggtgaaactgatgccttatcaggaaataaatttagagaaacatccgaacaagtctattgcagatgtttacaattcttaaaattaatacatgcattagctatcaattattttgcatcattagaaaaaatcaacgaacaagaagaaataaataataaaaattttgaaaatatcaattcacaaacatgtactaatgatattgatgaaaatgtggaaaacgaaaaactttgctcagctagccaaaatgataattcttttgaaaataaaggtaataaagtgataaataacctgaacaattcaggtaaagtaaatgaaaaaaaaaaaaaaaaagctgaaatgaaggatgataatgaaaaaaaagaatttgatgagaataatataaaagaggaggaggaggaggaggagtacgacaacgacgacgattttactgttgaaaataataaatatgtggacgatgaaaaaatgaatgatgagatggtaaaaaaaccgaaaaataagaaaggtgtgtataatgttgtgatggtttctcatagttcctttatagttcatatgttagctttattagattatttagatttggat

SEQ ID NO: 367 - DNA, 1746 bp, Plasmodium falciparum
catagttcctttatagttcatatgttagctttattagattatttagatttggatttccgaggattaaataattgtgatattagaaaaataagtattccattgagtcattcttttttattttataataatataacgaatttacaaatagcacgtccattatcaataaataatattcctataagttacatgaataaaaataaagcattaaaaaaggcttataaagataaatatatatatacaataaatagttatacagaattagatgacctcatatgttcacaaccatgtaccgtaataatatatcaatatgatatgcttataaagaatgaaaagaataaaaaatatttagacagtgtacaaaagtttattgataacagtaataattattatagtaactcgaataaagaaaatcatgtgtattcaaatggtttatataaaaattatgttttaagaaataaacgtttaggtcgcaatgtgttaatatatgatggtagtgaatatctcatttatgtaccagaaaaaggttcatgggaaaacaataaaaaaggatatatagttggtcagaatattattcttgtggtattaccagaggtagaatcgaaaattataaataaagaaaatgttggagaagaggagtatgtatctttgaatactaaaaataaagaacaaaatgaaaattataaaaaaacatcacattatttacaaaatgtaattgaagttataaagaattatgatagtatacaagatctaataaaatcaattgatttctggattaccttaaaagaaaatataaaaaatatagatatacctacgtttcaaaaatatttgattgaaaaatataataaaattataaaaaatgaaatggatgtatgttatgtggatattgttggatgtatcgagaacgaagaatttatgaaaaaaaatgagcataaatgtaatggatatttgaaaagtctaaaagaaaaatatgaaaaaaataatgatataaattttgaagaggagtgtaaatatattaacgaaaattttatagaagaaatatttacttctgattattcttcaccaaatttagatataaaaaatgaaaaagatatatcaagtgataataaaaataaaaataaaaataatgacaacaataataataataataataataataatgatgatgattttcataataataatagttatatacaaaataatgacttccttgaagaaaatataataagaaaaaaatttatttatataccaaaaaatgatagtaacaatataaaaattcaatccaatataaaacaaacatataaagatgaaaaacaaaataaaagtttccttcaagaaaatattaacatattaaaatcttttccacaatctattcaaaacttaagtgtagaaatgttttatcgtgataattatttttatttccattgtttaaataagtatattaaaagtaaaaacaaaatcgaaggtttaattatttgtaaattgttgacatatcttgatcttttaagatcatataatacacatggattaaataaaacatttcaaagattaatgcatatagaagaaaaaatagataacaatactaaaggtataggggaaacacttaatacatattcttgtgatataaaccctgtgcttgctaataatacttcctactatggagaaggaccaaaaaaatataagatcatttattcaataccaggcaagaaaattaaaaaaaataaaattaaaaaaaataaaataaaataa

SEQ ID NO: 368 - DNA, 2304 bp, Plasmodium falciparum
cttactcaagaaggacatgataccgatggaatcacatcattcggagtatcacccctcatgaacaataataatatgtatggtaataattatattcataataatgtgtattatccatgtaatggaataaacaattattataataacaatgttgtgaattcacaaaataattatatgatgaaaatgatcatgtcaaattattattctgaatcatttttaaatttaacgagtgggaaaaattatccagatattatagaaaaaataagaaataaattattatataaatataataataatgttgaaaaatctatttttcataatttttataataatatccttaatttaatacaacctgttaatgcaatagtacctgtgtattcaaataaatatgatgaaattaataatgcttctatatgtacaaatattataaacatgttttcgaatggaaaatggatatttaccatgccattatttaatcctaataaaaggaaatgtgaagtgagtgaatattttaatcataaatatgaactgaaaaaaccaaagcatttatttttagtaaagtggatgtttttaaatacagataattataaaataaaaaaaaacaaacaaaaagaacatgtaatggatactaataatgctcttgtaaataataattctttaggtaaaaatgtgagcaaaaatgatattcatagggataatataaatgattattctttgaacgaccaggaggatcaacaatacaataagggatattactatgatgattatgatgattatgatgattatgatgatgatgataataatgatgataataatgataataataataataataatgatgataataataataataatgatgacgattatttaagtaatgtaaaagtcgagagtgataataataatactcatcagaataatcctgatgggtatgaaggtaatgattcaagttccatgtgtagtgataataataaaaaatcgaaacaaaaaaaaatgaaatgtaatttgaatttcagatcagtacttggatttttatccatgtgtccatttaattttgatacaaaaagaaatatatatgataatcaaactgcagatatatatgctgtatgttcaagtattgattatagttatacgaatgatacttatacatgggtaaattatgttacagtgcttccaaataaatatttcctaactttctttttatcatccattccttatcatgataatgtaattattcaaacaaggacaaatctatatacgtctgatatattatctataaaaatatttgattcaaaagaaattattttaaaaaatatgaaaaaaatgaaacataaaaataaaacaaatacaaccaattattatgatactaattcgacaatcaataatccaaatattaccaagcatgatttgttgagagtaaattatcttcgttatgtcatgtccaaattattattatccttaactttgtcttttaatcgtcaggaaatcgagcaaaacacgcaacctcttaaattaagtgaaaagagtaaaaggaaaagtgtcataattaataaggatggaccaaataacgacaacagggttgatgcgaatgataaaaatgttaatggtaatgataaaaatgttaatgataatgataaaaatgttaacagtcaagataatcagggtaaccaaaaagaccattttgatgatgaagatgaagaatattttagtgacgaagatataatgagtgatatagaagaaaataatattttaaaggaaaatctctatttaaaacaaatagttataaatatgattgaagaaaataatatggattatataaattataataaatatagtatggataatatggacatagatgaacattttaatttacaatatttatatgaggatgaacattttataaatctaaatgaaaaatggtataataacaaaggagaaattttaatgaatacatatgattatttatataactctttaaaaaatgaaaatgattataatcaatataataacaataacaacaacaataacaataacaataataacagttcttatatggttaaaaatataaaagaaaaagctttaaactccttagaagctgttaaaagtagttatctaaataataacttttctgtacaagtacaaaatacaatgaatgcttatgaaagaactaattctgaagattttctcttctttcaaccaataaacatttctcctattaaagaagcaaattacaaattaaggtccatgtattataatgaagtagcacctaccctggacaaatttaggagaacaaatcgacaagtgtaa

SEQ ID NO: 369 - DNA, 684 bp, Plasmodium falciparum
atgaagtatttaacatttaataaaaataacagagatgctattgatttgagtgaaaaactagaagctactaaaatagatttatcgaatcccttattattacaatataattgggtgatatgggaacaagtatcagataataaaataaaacaaagtaataattataaggattatacaagaccactagctaaatttaatagtgttcaaaaattttggcaattatggaatagattacctcaaccaagtgatttactggcacaaagaagtatgaccagattttcagaagatggaatatttcgtattgttgatgctcttatgatatttagagataatatacaacctatgtgggaagatccagcaaattcaggcggtggtcattttgaatataaaatattacctaaggattatccatatagccaaattgatgaattttggaataatctcgttttagctataattggatgtagtttaaaacattatgatttaataacaggtattagattagtagataaattaagtactacaagatatggatatataagaatagaaatatggtatactactataactgatgaaagtgttaaaaactatttgagaaaagatctagaagaacatatgtgtaatcgtattgatggatcgactatatttccaccaagagtaaaaagtcttagtcacatacatagataa

SEQ ID NO: 370 - DNA, 1386 bp, Plasmodium falciparum
atgaataagatggctagcactcataacgagattattccgcgacttggttttgaagaaatgaggaacgaaatgaacaaatacggtgtggaaataaatcagagtacgttaaaaaacccgagcacagaagatatacaagggatatatagtttatgtataaaatatatattaaataaagatattcagaatatacgaatagaagagtatacaggagatttaaaaagttctttacccacagttgatggtttacagatattaccaaatgaaggtaagaatcatttacaagctattggtaatttaagatttcttcgacattgtgaaaagattaataagatattaaatttagataatattttaagttatatttttaagccagtaggtagtcatatgacaaaattaataaatgcatttatacattttatgaaatatcgcgatcaattatataatgagaatggtgaaaagataaaaagtattcaagaaaaaaagaatgaatatgatgttttagaaaatgaatatgatgctttagaaaatgaattgaataaattacttttaaaacatgaggacataaggaataatattattaatgaaaagaatattaaaagaaattatgaggaagatattataaaaaatcaaaatttattaaattcacaacagagtcttataatatctttaaattcaacaaaggataaaatcgtaaatgaaacaaacgagttaatatttcagtattcaagatatagacaaaaaaaagaagatttagaagatcaaattgtgccatcacccgaaaaattacaaaaatataatgaagaattaaaagatcatctttatgaacatatagctcaatttgaagatgatagaaaaaaaaatgaagatattaaaaataaaatcaatatagctgatatttgtataaagaaattagttgatttattaacggcattaaatgaacatattgaacatacaattaaattacatattgaaaaaaaaaataatcttcaaaccatagagaaacaatataaatctttaacaaatgaaaaacaaaattttataacaaaaaatacagaacaagataaaattataaaagaaacaaaagaatttctacagcaagaacaaacaaaatggaaccaaaaaattaaacaagaacaacataatactatattaatacaacaaaaagtaaaagatatatatcaaaatgttgatgatcttaatattaaaactaatagagaaattaaccaaattaataatatcattaaacatatacaagatattattaatcattataataaaaacatccttctaataactgaacttatacaaaacacgaaaaattctcacagtatacttacacacaaggtactcaacaatatacaaaaggatatcagcgcaaacatgtga

SEQ ID NO: 371 - DNA, 2844 bp, Plasmodium falciparum
aaattagataaggagaagaaaaaaaatgtaatagaattaaaggaatatttagaagatttgaaaaaaagaatgtttgatatgcaaaaaagattgaacgatataattattactaagtctacttttttaaaaaacgaaagtgaattaaatatgaaattgtttgaaacaagtgctatagattatgttaataataatagtaattttgaagttttttcaacatacataataaatgattttatgttaaacaagaagagaataaatgttttaaattatgacagcaatttattttttaagaataattttatgtattttaattttttacataattatttgaaagaaaaaaaagatgaacatgttttaaatgtttatatatatttaaaagatcctcttattcaagaatatgaattaaattattttaattattatgttgttttagatttgtatatattagatgttataataaaaaatgtagatttattaatagaaaagaaagggaagaaaagaaaaaatgtgaatcatatcttagtatgtatcgataattatgttgtaaaatataatgtactatcaagtaatatatatttagatattcaacaagatatcaaaagtttttttcatgaaagtaatcgtaatgttgatggaagtaaaatacaagatatgctttttcattttgaaagaaaaaataattctatttatcaaaataatatgtttcatgataaatattataaaaaaaaaataaagaaagatataaaagaagaaaaaaaacaaaatgatagtttacaaaaatataataaaaatatagatccattattatttattcgaaaaaaaaatatcttttttgattcccagaaagaatattataaaaaatttttatcttcttatacatatgaagaaattgtaaatattttatgtaataaaagttcaagatgtaataacagaatttttcaattaataaatgatgttaataaaaatacatttatattaaaaagtcatctcgctttaaaaaatgaattaaaaaaattctttcaaattaatcaaaataaattattgaagaataagacaggtgttggattaattaacagcactaaggatgatataaatcgcataaccaacatgaatcttgcaacaaatacaaataatgctatgggaaatataacaaatgattctaatattattaatacaaataataataataatacaagcgatataaataataataatacaagcgatataaataataataatacaaacaatataaataataataatacaaacaatataaataataataatacaaacaatataaataataatacaaacaatacaaataataatagtaataataataataataataacatttttaataatgaagattcattaaataaatgcagtgcctatacataccccttctctaatgatgccgaaaaaaattaccaggaaaatagaaatcaaagtttttcaaacagtgatcactgttttaaattattaaattcaatacaaggtgctaataaatctagcgattttattaatatgcaaaacattgatgattatttaaatacatactatgtagcctatcatgaatcatttaaagttgttaaaaaagaacactactattccgtcatttctcatatctttgaaagttatttaaatatagatgaatcttcgaatgatgatgatcatcctattcataaaaaatatccccacttaaaaggtagaaatgtatccatcaattttttgggtcagctacctgaaattatgaaggtttataaaacgtttcgttattgtgattcccttaatgttttggcgaaaagctatattcctaagtcccctgcaagtgttcaaagtttagacaaaggggaagataataatgataatgatgaaaaaggcgaaagtggagaggacacacaagtgattgaaaaggatgatagtggagaagacagacaaatgattgaaaaggatgatagtggagaagacagacaaatgattgaaaaggatgatagtggagaagacagacaaatgattgaaaaggatgatagtggagaagacagacaaatgattgaaaaggatgatagtggagaagacagacaaatgattgaaaaagatgatagtggagaagacagacaaatgattgaaaaagacaaaagtagagatgataataaagctcaaaataataattctacagataatgaagaacatgacgaaataacagaacagattggatttttaaaaaatcataatcaaaaatatatgcgactatttcaaaagcatttattagaggaaataaaatttattaatttttttgaattccttgtacagaaaaaattaggagttatattagagaaaaatgaatttttgaaattatatattttttatggtcaaaaaaatttacctagcatgccatatactccacttttttttacctgtagaacaattattaaaatagaagtattaagagatgttaatacaaatcaaatcatttattctagtagatctttctttttagaaactttaataacattaaaagaatataaaattaaaaatgaaagtgcatatattgttattgaaactacagatgaaagtagtactattaaaaaaagattaaaaatggatatgttacataaaatatcacccatgtcacatattaatgcatatgtcatatctaataaaggaaaagaaattgtttatcataaaggtaatatatatcaacgatcagctagcgatatcaaaaatgttataagtgacataagaaatgatttcttaaatattattttaccacaatatcatttatttgatttatttgataattatgtttatataattatatgtttaaaaaatgaaaattgttag

SEQ ID NO: 372 - DNA, 2370 bp, Plasmodium falciparum
atgcattttgtagttgaattggataatacaggtgatgattttaatgataaggctatatccattgaaagatttagaaatgtttttgaggtttatgttgaagacaaaatagatgaattagatacaaaaccatcagaaatacttaataaagaatgtcgacattttaattattttattgatgatatgaaagatgagtttctcacgtcttcattaatacgtctccccaaaaaattaagaaagcaattatgggaaagtgaagttgatgaaaatttaccaaatttaatggctacaactacacataataagtgtctaagaacagaacataattatgataaaaagtatagggacgtcattaaaatattagaagattattgtgaagatagggctactaaattgagggatttaaaagccataaaatatgcagaacaggattgtattaattttaatacctgggtaagtagttgggactatgaaataaaaaggcaaatgaataaattagatatttcaaaaataaaacaatatttggaaaagtcaaagttcaaatgtgatataaatgatttagataatttagatacatttttttcccatgtaaatccaaaagatatgaagggaagtgaagaggatccaagaaatcctcaggaagaagagcacaaaagagatgaatatcaagttttaaatagtacagttgaagaaggtgatgaatatgttgatagaataaatatcctttctacagaaacaggcgaagcgacaccaaatattcaagaagaacctttaagggttactcctcatggaggggataatcatgttaaaacacctcctacaattgtaaagactgaagtaggtaatgataatcgagagaatgtagtttctactgctggtaaaagattaaatagaggtaaaccaaataaagatggggttccacatacatctagatttaaaacacctaaagttagtgcacctgctggagggaaaaaatctaaaaatgcaagagatagtactgaaccaaaacatcataaggaaaaaggaaaatatgataggattaaaaaaacaagcgaacaaataaataaatacgctcatcctaataataaatatactatctttcagtgtactgatttagattgtaaatggctgaaacctaaacatattaaatatccatatgaaggttatgatatagttgataatgataaacttgtagatacaggaaagggagattatgaagatcatcatacatattgttctggagatgaatgtgcatttggtaatgctgttgggggacagtttgacgaaagcagatctcaaggtaagcaaagaagaaaaaaagggaaaggaaagggtagaaaaaagggtcataataaattagaaggtaaaagttcacctaatgttgaaggtactcattcttatataacaaatggaggtaatatagaagaaacaaaaagccaatcatattctgtaactgacaattatgttgaggaagaagctgcaagttgcccagaaggtgaccaaaattgcattgatcttataaaagacgaatttatcatagaaggtggtcgttttatccgtacatcaattaatgatgttccacaaatggaagctataactaacaaatatatgcctggatccatttatgaaaatccttcatctggtagttcacatattgaagataaaggacaattaaaagatttcactattgaaacagtcaaatatacatcagatggacttaatggatttgatcatgaagaaccagtgacagatcctaaattattacatggtgaacaacttatagaatttacgggaaaagtttatgaatctctacctcatcataatgatattgcgttgcatggtagtccaataccacgtcgacgtttttcaagaagctatccattaaatactacaactacattggaaggtacatctcaaaaaccatctgcagttgaaacaataatgtccctatttagaaatatttttgattctataaaaagttcttcaataactagaagaagcgttaattcagctcttgaatttagtgaatctacaactaggcctggaaattcattttctttgcctcaaatgacttgggaatttgaagctcctggtcaaggaacggtgatgagaatgttaggacagaaaaattctttcaaaacacttgcacaaacaaaacaggaagtttcttcatctagttctgaatcacgttcaagttccttcaacaataactcccaaataattccccatatattgaaaacgcaagttgatggaacatatgttgtgtcaggacataaagcaaatgttcccaaaggcattgaacattatataaagtatgtccccgtagctttagcagtttttggagttcttttcgtttttatattatttaacaaa

SEQ ID NO: 373 - DNA, 474 bp, Plasmodium falciparum
atgaatattcgaaagttcataccatctttagctttaatgcttatattcttcgcttttgcaaacctggtattatcagatgcaaatgacaaagcaaaaaagcccgctggaaaaggatccccttcaactttgcaaaccccaggaagttcttcaggtgcctctcttcatgctgttggacctaatcaaggtggactatctcaaggtctttctggaaaagattctgctgacaaaatgcctttagaaactcagctagctatagaagaaatcaagagcttatccaatatgttagataaaaaaacgacagttaacagaaacttaatcataagtactgctgtcacaaatatgatcatgttgatcatattatctggtatagttggatttaaagttaaaaaaacgaagaacgcagatgatgataaaggagataaggataaggacaaggataatacagatgaaggagacgaaggagatgattcttaa

SEQ ID NO: 374 - DNA, 2220 bp, Plasmodium falciparum
tatttttcaaatgttatagaaaatgaaataagtatatcctatttaatatttaaaattaataatctgcataattatcattgtttatataatatttttaaaaatatctatatgataagaaataaaggatgtatgcatattaataacacggatattattaatctatataattctatattgagggtactaaaggtattcaatggtcaaaagttgttactctttgattccacatatatgtttgatgatatgaatagaaacgaaagattaatgaatagggatgagcatgtgcaaacaaataatagtatttattataaaaacggtggttatgataaattaccagaagacaataattgtggtgatatccatggtgataatcattctaatgatatattttcgtataacgagagcagcttcttgaattatccatccaatttttctgatgaaaacagaagtaccttggaggagtatacaagaagatgttcaataaataaaataaatgaacataatttacctaaagaaaaaaatatatcaacttatactgataaaatggatgccaaaataaatgataaacaaaataatgacaaaatggatttagcgaatagtgagcagaattatttggaaggtgatttaacaagtgatatgtatgaatgtacagaagaaaaggttatagataaattaaatatggataaattaaatatggataaattaaatatggataaattaaatatggataaattaaatatggataaattaaatatggataaattaaatatggataaattaaatatagataaattaaatatagataaatcacatacagataaatcattcataaattctgaaagttttaatttcagtgaaaataaaataaaaagtggtgtgagcgaatttttattaccttcagcatcacaatatggaagagagaattataattatgataaagaatttctgagaataaatatttatgctgaaaagattccacttatacatatgagagatattatatttattaataatttaataaatatatttgtaaacaataataatttattttctaataatatgtataaagtctatggaaaggttctcatatttttaactacatattcaccatatgaatatgtgtacaaccaatattactcttccttttttgaaaagaaaaagaaaaagaattcttttaaaaaatattgtacgtcattttttgatatttatgatgataggatgatggttggtacgaaagacaagaagaagaataagaaaaagaagaagaagaaaaataaaaataaaaattataacaataataataataataataaaattcttgaggatgatgaatatgttgataatatatattataacaatacaaataatgaccatcagtcatatgaaaaatcaaatgaaagtagtttttctaacgatacagataatgaagaagaaaaaaaaacagacagtatattaaacgtcaaaaataataatgatgataattatacaataaaaaaaatgaaccctgaaaaaaagatagaaaataattgtcttgatgaatttaataatgccttaataacaaatggaaaggataatataatcggtttaaaagataatacaggagatgaagaaaagacaaatttaaataacatgagtgacaagaatttattaatacaaaatcaaataaatgaacatgaggaaaagaacatgaaagagtgggatgataataagaaaaagaattcaaaaacgatttgttcaattaaaaatattatagatcgaaataaaaaggaagaatatcctaataatattgatgatctttttgaaattaaaacagaagctaaatcttgtcatgaaataaaaagtagtgtatttcttaatattaaaagtaaaaaaaaattaaaaactaataaaataaataaaaaaaaaaaatattatttttataaattattccataaatttagaatgtcatataatcattttattaaatatacacaaaatgaaattttccatatatatgaaataatacatggaaattattcagatgtacaaaaagataaaatgttaataagaaaaataaatagtaatttagcagcatctattatttataaatatatttataataatatatatgaatatattaataactcaaaaattaatttaatatatcctaaatttattcttttaaaatatattgtcgataaatatcctcaaaagagatatttaaccctacactttttaaag

SEQ ID NO: 375 - DNA, 2967 bp, Plasmodium falciparum
ataagtaatcacaagagtataagtaatcacaagagtataagtaatcataagagtataagtaatcacaagggtaaaaataatcacaagagtaaagataatcacaagagtaaaaataatcacaaaagtaaagataatcacaaaagtaaagataatcacgatagtgataaaaatgaggaagacatagaaaatgatgaagatacattacatataattgatggcgaaacaaatacaaatttgtcatcagatgtaagcgaagacgattcctctaatacagatagcgaagacgattcctctaatacagatagcgaagactctggtaaagacaattttgatgagaataatttttctctaccatattttatatttgtcttaagagatgtaaataaggaagagttttccaaaatgaacttacaaaatgatagtttgtttaatgaggaagattcaaatatgaatggaaatgttaatggaaatatgaatggaaatgttaatggaaatatgaatggaaatgtcaatggaaatgttaatggaaatatgaatggaaatatgaatggaaatatgaatggaaatgttaatggaaatatgaatggaaatatgaatggaaatatgaatggaaatatgaatggaaatgttaatggaaatgttaatggaaatgttaatggaaatgttaatggaaatgttaatggaaatgttaatggaaatgttaatggaaatattaatgagaatatgaataatctttttaatgactgtatgtattataatcaacattctaacaacgaacatgacaataatgttaatggtaataataatattaatagtaacaataataataataatggtaacaattttcattatagttatgataattattcatatgattccttagctagacaatatttagattcactaataaacatgataaatgacgatgtaacacagaaaaaggttcaatgtatgttaaaattattaacaagaaaaaacatattcatgttaccatcattatatacaaacgataacgattatattataaatgaagaatatatgaaggaattaagtaaaataaaaaaagagttatatatccaagggaaaacaatagataatatgtataaaaataatggtacgtatatatataaatatataagtatgttattatatacaactaataatgatattttttatacaccaaaacaattacaaaaaaaaatagaaaattttgaatgtaaaatgttatataatgttcttatagataatttcttacttcatataagaaaaaaaattgaaaaaaaattacccatgaaacctaatatgtttttaacattaatcaatgatttaaagatagagtttattttaacttttgaaaaatttgctattggaaatataaaaattaaaaaaaaatataaaaaccaattatattctgatatggatgttataatattaaaagcttataaagaaaatatagcattcagttgttttagtttttataatattattgatcaaagaataaacactttacaaatttatgagaagattaataattttaagtatgaaaactttagtcagctacaaatcgatctagatcttattaatgacgagaaagtagataatcttatatataatgaaatcttaggtataaaaaaggaagaaatatttacacacttcatcaatgtttatcatgataatgaaaaagaaacaactgatctgttttataatacggacttagcggataacaagcaaaaaaaatcgtatgctctaccaaaagaaaaaaaaagcctaacacatgcaaatagtagaacacatgaaaataatgataataataaatataataataacaatagtaataataatgatacatctgatacattaagcgacacggataataataaaaagtatgaataccaaaaaagtaaaaaaatctcgtcgacatatttaggaatagacaaaaacaataataataataataacaataataataataataatcttaataattatggtaatccattgttatatggaaacagtatgaaaaaaagcaaaactaaatacgaagggaaatttgtaaaatatgaagataccataaatcaagataaagatactgatgatatttcctttaaagagttcgaacaaagtaatgagaagaaaagttcgaaaataaatacatataataataattcttatagaagaaaaagtacaaatgaaatgtatgtcaatgctgatgattcttatttttatcaaaccaaaacaaaattaccaagtaagagtaattatattaataataataataataataataataataataataataataattataataataataataatatcaacagatcaatgagctcatccaaaaaacaataccataaatttaaatctgatctaggtttaatatatgcaaggaaaaaaaaagtacacaaatataatcatgtacccaaaaaatattatagtgtagattattctaacgaaaataatgaatatatacataaaaattcggtactatatgaaaatgtgaatagttcagaattattcccagaagaaggtgtagatatatacacagatgatgataatatacaagatgaatacgatcaagaagtaaattacaacgccctacaacaaaataataaatatctatcatcaaatagtagattatatagtaaaaatgataaattaggaaatcattccaaatcgaatatctctagaaacataagtaattctgatatggaaatggtaaatttgaaagaaaacgatgatgatgaagaagtagaagaaaatgatgaagatgatgatgatgataataataataaaattgcttttattaaaaaaaaagtctctagtaatttatctaatataaaagataaattaacctttcatgaaaaaaattattccgaaagtaaaaaatcgagtcaaaccatctcaaggaagaaaacaaggatgagttgtctaccaaaaaaaaaaagttcaaaatga

SEQ ID NO: 376 - DNA, 300 bp, Plasmodium falciparum
atgaagttacgtattctaaaaaaacactattacgtggtctttatattgttgtatttatatgacattagttgttttaaatgtatacgtttgaataatcgtagtatttataagaataaatacaagaataatgtccatataggaactaatgagaatataagaagtatagaaaaatattccaatgttttatgtaatagtatattatgtaaaaatgataaaattagttcatttataaatcaaagaaaaaatgtagatgatgatgatgaaagtgaaaatgatgatatgtatgaatctactacagct

SEQ ID NO: 377 - DNA, 1305 bp, Plasmodium falciparum
aaaaaatccaaatctactattgatctcttgcgtgttattgatatacccaaaggagagtatggaatacctacatcgaaatcaaaaaataggtacataccgtatgccagtgatcgatataaaggaaaaacatacatttatatggagggggatgaatcggatgactacacatatattggagatatatcgtcatctgatattacttcttctgaaagcgagtatgaagatattgatataaataatatatatccatataaatcacccaaatacaaaactttgattgacgtggtactagaaccatcaaaaagagatacatttaatacacaaagtgatataccaagtgacacatctaccaataaatttacagataatgaatggaatcaattgaaacaggattttatctcaaatattttacaaagtacacaaatggatttacctaatgaaaatatcattgatgattttatggataagggtatacaacctaataatcctgttttagacgttaatatggcagaaaaaccttttattacatctattcatgatagagatttacataatggtgaagaggttacttataatattaattttgatgtttccaaaaatattaatgagattactaatactacggatgattcaaaatatgtttcaaacaatatatatagtggaattgatttaattaatgattcattaaacagcgatcaacatgttgatatttatgatgaattgttgaaacgaaaagaaaacgaaatatttggaacaaatcatacaaaacatacaacaacaaatagtattgcaaaacaaacacatactgatcctatactcaaccaactagatttgttccataaatggttagatagacatagaaatatgtgcgaacagtggaataaaaataaaaaagaagaattgttagataaattgaaagaagaatggaataaaaaaaataacaataatagtgatctcacacacactagtagtaacataccaagtggtgaaaatagtattaagaatgtgttgaatactgatgtttctatacaaatagatatggatgatcctaaacctataaacgaatttacatatatggataatataattgataatttggaaaaaaatagtgaaccctactatgatattgatgaagatgatataatctattttgatatagatgatgaaaaaacacctatgtatcataataatatggataataataaatctaatgtacctactaaagtacaaattgaaatgaatgtcattaataagcaggagttattccaagaggaattccctatatcggatatatggaatatataa

SEQ ID NO: 378 - DNA, 2106 bp, Plasmodium falciparum
gatatctatacgaattgtgaatcacccacctattcatacagttcaataaagaataataatgacagatatgtaagaattttaagtgaaactgaaccaccgatgagtttagaggaaataatgagaacatttgatgaagatcatctatattctataagaaactatattgaatgtttaagaaacgctccatatatcgatgatcctttgtggggttcggttgttacagataaacgtaataattgtcttcagcatattaaattattggaaatgcaagaatccgaaagaagaaaacaacaagaagaggagaatgctaaggatattgaagaaataagaaagaaagaaaaagaataccttatgaaagaattagaagaaatggatgaatccgatgtagaaaaggcatttagagaattacaatttattaagttaagagatagaactagacctagaaaacatgtgaatgtaatgggagaatctaaggaaacagatgaatctaaggaaacagatgaatctaaggaaactggtgaatctaaggaaactggtgaatctaaggaaactggtgaatctaaggaaactggtgaatctaaggaaactggtgaatctaaggaaactggtgaatctaaggaaactggtgaatctaaggaaactggtgaatctaaggaaactggtgaatctaaggaaactggtgaatctaaggaaactggtgaatctaaggaaactggtgaatctaaggaaactggtgaatctaaggaaactggtgaatctaaggaaacaagaatatatgaggaaacaaaatataacaaaataacgagtgaatttagagaaacagaaaacgtgaagataacagaggaatctaaggatagagaaggtaacaaagtatcaggtccatatgaaaactcagaaaattccaatgtaacaagtgaatctgaagagaccaaaaaattagccgaaaaagaggagaatgagggagaaaaattaggagaaaatgttaatgatggggcatcagaaaattcagaagatcccaaaaaattaacagaacaagaagaaaatggtacaaaggaaagttctgaagaaacaaaagatgataaaccggaagaaaatgagaaaaaggcagataataaaaaaaaaagtaaaaaaaagaaaaaatcattttttcaaatgttaggatgtaatttcctatgtaataaaaatattgaaactgatgatgaagaagaaacgttggtagtaaaagatgatgctaaaaagaaacataaatttttaagagaagctaatactgaaaaaaatgataatgaaaagaaagataaattattaggagaaggagataaagaagatgttaaagaaaagaatgatgaacagaaagataaagtattaggagaaggagataaagaagatgttaaagaaaagaatgatgaacagaaagataaagtattaggagaaggagataaagaagatgttaaagaaaagaatgatggaaagaaagataaagtgataggatcagaaaaaacacaaaaggaaattaaagaaaaagtagaaaaaagagttaaaaaaaagtgtaaaaaaaaagtaaaaaaaggaattaaagaaaatgatactgaaggtaacgataaagtgaaaggaccagaaataataattgaagaagtaaaagaagaaattaaaaaacaagtagaagatggaattaaagaaaatgatactgaaggtaacgataaagtgaaagggccagaaataataactgaagaagtaaaagaagaaattaaaaaacaagtagaagaaggaattaaagaaaatgatactgaaggtaacgataaagtgaaagggccagaaataataactgaagaagtaaaagaagaaattaaaaaacaagtagaagaaggaattaaagaaaatgatactgaaagtaaggataaattgataggacaagaaataataactgaagaagtaaaagaaggaattaaagaaaatgatactgaaaataaagataaagtgataggacaagaaataataactgaagaagtaaaagaaggaattaaagaaaatgatactgaaaataaagataaagtgataggacaagaaataataactgaagaagtaaaaaaagaaattgaaaaacaagaa

SEQ ID NO: 379 - DNA, 402 bp, Plasmodium falciparum
gattactatgctgtattaggtcttactaaagattgtacacaagatgatataaaaaaagcatatagaaaactggctatgaaatggcatcctgataagcacctaaatgacgaagataaagttgaagcagaaaggaaatttaaattgattggtgaagcatatgaagtgttatcagatgaagagaaaagaaaaaattacgatttatttggacaatcaggattaggaggaactacaactaacgatgaagcatattatacatattcaaatatagatcctaatgaattgttcagtaggtttttttctcatgatgcaagttctttcttttcgcaaggttttgatgactttccatcttttcaaggtttcgcaagtatgaattcaagaagacctagatcaagcagatcaaat

SEQ ID NO: 380 - DNA, 567 bp, Plasmodium falciparum
aatattttttctcgatcatttggtagagcagcttcatttgaagttcccttgcaagttacactggaagaattatataccggttgtagaaaaaaattaaaggtaacaagaaaaaggtttgtgggtcttaatagttatgaagataatacatttataactgttgatgtaaaacctggatggagtgaaggaacgaaaattaattttcatggtgagggagaacaatcatctcctaatgaacaacccggagatttagtttttattataaaaacaaaaccacatgatagatttataagagaagggaataatttaatatataagtgttatttaccattagataaagctttaactggttttcaatttagtataaaatctttggataatagagatataaatgtaagagtagatgatataattaatccaaatagtaaaaagataataactaatgaaggtatgccgtattcaaaaagtccatcggttaaaggtgatcttttcattgaatttgatattgtctttcctaaaaaattaagtcctgaacaaaaaagaacattaaaggaaaccttggaaaatacg

SEQ ID NO: 381 - DNA, 1158 bp, Plasmodium falciparum
aggtcatatcccaaatctggccataagggacatacgaaattaaatcaaccagtagttagaacattagcagattttaatgacatgtttgcaaaccaaaaaaatacatttaattttctaaaacatataaatcattataaaaatgaacaagatacaaataatacacacacgccaaatcatgatgaatattctcataatttgccaaaaaatcacgaagagtcaaatgcaaatatgaacaatcataattctttcaatgacaaatctgttaataaaaaagaagctttcgatcaatttttacaaacgttattaaacaattatgaaataatgcataaagaagatgaaagtaaagaatcaaatcaacataactataaagaaggtccctcatatgaagataaaaaaaatatgtacaaagaaatattgaaaggatattataatgtattttttgaaaattatgcaaacgacacagaatcaaatgtacataataaacctgaggaagttcataaacatgaggaaattcataaacataggaaacttcataaacatgaagaagttcataaacctgaggaatttcataaacctgaggaatttcataaacatgagaaagttcataaacatgaagaagttcataaacctgaggaagttcataaacatgaggaaaatcataaacatgaggaaaatcataaacctcaaatggtaggtcaagcacctccagaaaaagagatacgccaagaatcaagaactctaatacttggttcatttccccaagcaggtgaaatattaagagaggatttatggaacaaagaggataacaaatttagttacgcacttgaccctaatgattatgcatctatagaagataaacttttaggatctatatttggatactttaaaaaaaatcatgacaatttggttaaacatttgttacaacaaattaatacttacaaacataaatatatggaacttaaagaacaatatattaatgaagttatgaaacttaaaaaaatatataacaaaagcatcatggtcatatttatagcatcttgtatttcaatattaggacctgtaatgttacacatgcatcaaaataatccagaagaattttttgcgaccatattaagtttttctatatcattaggtcttcataatttattactaacttaa

SEQ ID NO: 382 - DNA, 1203 bp, Plasmodium falciparum
atgattagaaaatttttgatttcgttatttttaatatttttatgtttgaacaatgttgtaattggaaataagtgtaagaaagcattgatagatattgatacaaaggatttgtctttgtctagtatattacgtgcacataaacccgataatacaacattaggttcatgggtttattttttctttaatcatttttcaaatgtggatgaagcaatagaatatttaaagggattaaatataaatgtattagatattgaagatcatgcttgttttgcaagagcttttagtgtatatttgcttcatttttatgcaaaagatttaaaaatgatgattagaaatgaagaacatgaatcatttttcaaaaataaattaagtgaaattaataatataatatctggtgatttcctttcaacattaaaacatgaatatttttttgataagttaccatctattatagttaaagaaaaagatgcatcccatatagtaaaaaggactgattttttacaagatatattagaaaaagcagatttaaataaccatgcaatttataaaaacgatcctacaaaagtatttatttttaatgaaataaatttttttagaacattccaattagaaggtaaaccacatatacctgatgatcaactttcttttatgcgtgattatgctttattaatttatcttggtactaaggaaaattattataattctgatataacagaatatgcacaaggaaattataatatttcgaaaaatagaacaagattaggattaaaaaaacgtagtaaaacattttctttagatgatccccaaaaaaattccaatatatttgctttttgtgaaaaaaatggaaaagaagaattttttggtacacctgatgatttaatttcatcatttttttctgatatgaaagctaaaatggttaaagggcataagagatttttgatggaatttgattatgctgttaaaaatagaacttatgctttacctaaagttaagggatttcgatttttaaaacaactttttcaaagaaaaaatttaaaaaatttcgtaggaatgtatataaaccttctgtctactgaaattgatttcttagcagaagattttgtagaaatgttcgatactactatgaattgttatggacgccaacatgccgctcgtgcagcagatcattatatggatatgaaactatcgaacatattcaaataa

SEQ ID NO: 383 - DNA, 1644 bp, Plasmodium falciparum
atgccaaatgtatatttacctcaaattttatggcatagtaaagataacaaaagaagtgatcgaatttattctttagatattcaaccatatccaaattattatagtgttaaaaaattaaataggaaatatgaattgtttatcaaatatttaaaagaaaaaggaaaaatagaatgtaataaattcgacactttagaagaaaaacaaaaaattataaatgattcaacattgccctcaaataataattataataatagtagtaataataataataataataataaatatgaaacattaaaattagataaagaactgaatcaaggaaatgaggataacattataaagacggtaattgggaataacacggaagttagtaataataacttattagatgatacaaacaataaattaaacgaaataaaaacaaatacatctacggaagatcaccaagaacacaatttagtaaataaaaaaaacgaaacgaatagttcatctaatgacaatatttcacataataaaacaccaatgcaatcaaataaattacttacatcattacaagatgataaaacaaaaaaaaaacctatcaaatttaatatagctacatgtggtgctgacgaattcgtacatttgtggagaatatttataaaagatgatatttcaattaaatgcttaggtagatttataggtcatagtggtgaaataaattgtgttcgttttaacaaaaatggtagatatatagcaagtgggggagaagataaatttttatatatatgggaaaaaagtaaaaaaccaaaaaatataccattaggttatgatataagctttttagattataaagaatggtggaatgtcgtagggtctttcagatgtagtggtgtaataaatagtattatttggtcaaacaatgataccttatatgtagcaaatgaagataataatatcaatattattgattttgtaaaaaatacaaactgtaaagtacaagtcttagaaggacattcaggtattattcaaggaatttcatttgacaataattatgaatatttagcatctcttagtgctgatcaaacattaaaaatatggaaaaagaaaaatgatggaaaatcatggaaattagaaaactccataaaaaatataagaagagatgaattggataaacttaataatgcatgcacgacatgtactgaatatgattttcctgataaaaataatacggacaaatacgaatccaatactttaaaacaagaaaataaaaaattaataaattatgatttattggaacaagaagcatataaaaaaaaaacaaaaaacaaaaaagaaaaagcagatgaagacgaagaagaagcaaataataacgaagatgtagaagaacaacaaacggatgtaggagaagaacatatagaaggacatctcaataataatatagtgcttaattcaaatattaacaaaatgaacaactccaataatctcaaaatgaataactccaatacaatcaaaatgaacaattcttttaatcaagaaaataatgttaaaccataccaacaaatacataccaagtttatgtcaaaaaaacatctagaagatggagaagaagaacaagaagaagaagaggaagaaaagaaattcaaaagaagccttttttcaagt

SEQ ID NO: 384 - DNA, 1641 bp, Plasmodium falciparum
gaacaagaagaagaagaggaagaaaagaaattcaaaagaagccttttttcaagtgaggaaatgctaccttcctttttcagacgtattgatttttctccaaatggggaatttttaataacacctagtggtattcaatttgaacaagtggaaaaagttaacgagaaaaataataaaaccgatgaaaatgctaaaccaaattatgaaattaaagcttatagctgcttttatatatatcataaaaacttatttttaaaatataatattcctttttttaccatattttcacaaacaagccatttcttagtagccaaatttaattataatacattcaaattaagaacagaacaaaatattcttaaaagatgttatgaacattttcttaataacttatctgatgtaaatgatgaagatatatcaaattcaaataaaaaaagaaaaatatatgatgataatttaaaattaaatgagttaatgtataatgaaaaactaatcaaattgaattatgaaaaaactctattatataatcatattgatatacctgatgatgtaagtcaaattgttagtagtaccatatcagaaagtgatgttgaatttaatgaagataaagtatccttgaaggaattatccgccgaaaattgcttgatgaaaaatacggaaaggaatgaggatggaaatgatgaagacaatacagaagagaatgttgaagaaaaaaaagatgatataaaggaagaaaaacaggatgatttaaaggaagaaaaaaaggatgattcaaaagatgattcaaaagatgattcaaaagatgattcaaaagataattcaaaagatgattcaaaaggtgattcaaaagatgattcaaaaggtgattcaaaagatgattcaaaagatgattcaaaagatgattcaaaagatgattcaaaagataattcaaaagatgattcaaaagatgattcaaaaggtgattcaaaaaatgattcaaaagatgattcaaaaaatgattcaaaggatgacacaaaggaagaatcaaaaaaagaaaacgaattagatataaataacaaattgaatgcagatgaagaagaagggaaaaatgatatcatggacaaatataatgataacaatgataatgttgaaatattaaatgaacaagatgcttcaagtgaacttaaagataaaaaggaggaaagatttatatatacattaggaacgtttgatggaagtgtatatttttatgatagtgagattcttgatatacccattagtatagttaagaatatacatttatgtcctataacagatatatcttggaataatttaggtaacgtttgtgcatgttcaagttcagatgggtatgttagcttttatcactttaataataatgaattaggaaatattaaatcttataaaaattactatttggataaaaaatgcaatgatttaacattcgatcaaaattattttaaaaacactttttatgatgaagtagagtttttaaataaagatgaatctaatgattatacgtctagcgaggatgaatttgatgatcataatttaattcctcctaaggaagaaacaaaagtgaaaagaattaatttaatagttggtaatgcagcaaattttgtcttatcgcaaaatactaagaaatga

SEQ ID NO: 385 - DNA, 1596 bp, Plasmodium falciparum
atgagtacgataattataaggttaagatgtgacataggtctttatcgtatagaaatagaaaataataagcaattaattgatttaaaaaagaaaattgaagaattattatctgtaccattagaaaaacaagaattatatttattagattctcctcaaatattattaaaagataactatgtaaaattaagagaatgcaaaatacaaaatggtagtatgattcaactaaaaagtgatataaaaccaagtactaaaaaaaaagaagagaatgaaaaaaaaaataaagagaatataaaaaatactgatgaaaataacaaagaaacatatgataaagacgtacataaaaatcaaatggattcattgtgtattcaaaaaaaagaaagtattgtaaataataatatgaacaaaatgtatgaccataaaaatacatataataatagtaataatagtaacattaataaaaatgacaattataataaaagtgaaaacagtaataacaataatgataataaaaaaggagaatctcaaccaaattttaaatccttcgattattttttaaaacaaagaggttataataccaccgatttacctcttaatttagaatacaaatctgtttatttatgcaaaggtcgagttaataaaataccgttaagcattacattgaaacatcaagaatatagacatgtggatcatctagaattaatgaatgtagaagaagttagaaattttgttaattattggtatacttataataatatgttagaacaaagaattggatggatgtatggatattatagagaagataatcattacaatttaggtattcgagctgtttgtgaatgtatatatgaacctccacaattttgtgaagataataaaatacatttattagaagatgattttctacctactgtagatttaatcgcagaaagattaggtttagaaagaataggatggatatttacacatttacctagacaagaatatcttacatctgatgaagtagtaaatatagcaaaaatgcaattaacgaatattaaaaaaaatatgcattatactaattatcctatatctaatttcattacgtgtaccatttcaccggaccctttattaagtaatgaacctgttactaatgcatttatggtttcggatttaggtatggccttaatgagagataatctaatagaagaaaatcaaatagatccttcacatatccaattaagaaatccaaataaaaatgaactattaccacaaattctagaaagtggaaaagaaacaaacaaatttgacacagattggtttattgtacgtgttaatgaatcagctccgaaggttgtaagatccatttttaaaaatttccattttccaagagaaaatagacaacattcacaatcagcttttcatgttaaagaatattttaggagtaataaattagatagaggaacaaaaggaatccatcaatgttccgattttcatcttatcttatttgtagccaaagttctagatatagaaacagctctagccttatgtgacgcaactttaaataaaaaagaaattgatccaattatagaagaaatgttaacatcagtaaagatatag

SEQ ID NO: 386 - DNA, 2316 bp, Plasmodium falciparum
tcccattttatagtaaataataataatgatgatcaagataaatacaatcttgtgaataaaataaatatggaaaatcttaacaaaatgaacaaagaaaatataccgaaggatgaagataacatgatgtatttaaaacaaagtgatagtaaaaacagctttgataattattgggatgtagacgatattaataagaagggtcctttcccgtcatcaaaattgagtgtctttttaaatgaaaatgggaataatgaacaagttcataatatgcaacttgaacttaataatatacaacattatgataacaaaggagatgttaaacaacgtaataattatgttatggaagaaaattatttagtagaaaattttattaacaaaaaaagcaacgatctaaaaagtgttccatatgatgataatcttactaatctaaatacaaatgaaaataatgtgtataataatgtaaaagacgaaatagaagtttcaataaataaaaatacaaataaaaatataattaatttatacgaaaataattttaaaagtatatcacagtgtcctcttgaagaaaaaaggataaatcacgtgtttaaaaaatttttaaataatgaagatttagatattcatataaatagaaatatggataatgaagaggaaagtcgaagaattaacgaaattaaagaaataattatgaagtatgcaaataatagaggttatggtaaagatggagatttgacatctgagcatgtgattaaaaaaaatgataataaaaatggtgataacaaaagtgatgatgataataaaaatggtgatgataataaaaatggtgatgataataaaaatggtgatgataataaaaatggtgatgataataaaaatggtgatgataacaaaagtggtgatgataacaaaagtgatgatgataataaaaatggtgatgataataaaaatggtgatgataacaaaagtgatgatgataacaaaagtgatgatggcaatttttttgttgagaatattacaccagaagaaagaaataaaatagatgaatttttaaaaaaacataattatctatataaaatagaaattcctacaaatttatatagagatgaagggaaattaaaagtgaatcctacgggtgatataaatgtacaaaagggtggtgattctataaatagcccaggtaataatagaaacaggaatgatacgaataatagtggtaataataataatataaatgatggtagtaataatagtaatcgtaataatagtaatcgtaataatagtcgtggtaataataataataataataatgacgacgacgatgatgatgatgataataataataataataatagaaataataacaactttagtagtagtaataatacaaatgaattagtttcaaaagtaaaaagacgaattattgattgtaggaataatagattaaattggggttcaacacaagttattatagatattgatgatactataagatctagtggaggatataaattttttaattataatttaggaggtgtagatgcacaatatcaaagaggagaaacttatccaggatcttttcaatttatttttgaattagctatgaataagttagctgcagaagctaaaccattattattatctgtgttaacagctcgaattcctcaagtacccataacagaagattcatatttaaataagaaatttaatgaagtagctgaaagaagaggtataaaacattggggtattgattgtgaaaataaaattttatattcaactttgaaagaatgggtttggaatgaaacaaggggtgaaaagaaattttttaattttaaacaattacataaatatgtaatacaacaaaattcattagtaagatatatatggataggtgatacaggtgatatggatagacaagccggggaattaatgattaaaacttttccacaaagaattaaagctgtttttcttcatcatgtcaaaggcaaagatgataatacactattaccaagtgattattttataaaatcagtacccatctttttttttcgtacatatatcggagcagcaaccaaagctcatgcatataatctaatcgataaaaaaggattaacaagagtattagtacaagccgttctagatcttgaaaaaagtaaagtaccagcagattcatcaaaatgggaagatctaataaaagatattattttaagtgatgcattagatgaactagataaatataatgctgaaacggttaatagaactaaaagaattatagcacaaaaaatgaaagaaatatcggaaaggaaattacattttataagttaa

SEQ ID NO: 387 - DNA, 2880 bp, Plasmodium falciparum
atgtacgatataaataagtcaatatgtgctgagataaaaagtgcggaacttgatgtattaaacagtggggagttgagaagaatatctatgggtaaatacgaaaatgagaaatatgaatatgaaaaaactcataaaagtggagttgttacaaaaatgtattatgacccgaaatatggtactattgatcataatcaaatatgttcagtatgttttgaaaggcacgagaattgtacaggtcatattggtcatattgaatttgttcttccgttatttaatccattattttataaagaattacaagaattattaaatttgatttgttatcattgttataatttttgttgttctgaggatgtcatttttttattaaaacatatttttcaattgaaatctttgaatcaaattgaaagcacgaataaaataaaatataaaaaaaattgtgattatgaatatataattgatcaagtggaaaaattatataaaaaaatatgtaaagattcaaatatttctttagacgacattgttgaagcaatatatgatgattatgaaaatgttcatgaggataaggatggaaattttgatgaatcagttgatcttttggattctctggaaaagataaaagatgagccggatgaaaaaaataaaaataataataataaaaataataataacaataacaataataataataataattataacaatgatgtagatatagatgttgataataataacaataatgtagatataaatgttgacaataataataattattttaatagcgatcttgtcgacttagctcctaatgaagaaatttatgaggaagaaacggacgcaggaagaagtgatgataataacaaagaaaacaaacctgattataacaaattaaaagaaagaattaagaaatataaatttgatgcaaataaattagcatttcaatcaaattataattatgaagaatatttaattttaagtaaaactataaaacttcatatgaaaaaaagtagcaaatgctgtttttgtaaatttcaaaggaatataagtgcaaaggtatcacaaagaagagataccataaatttcataggagtacacacaaacaaccctttttttaaaaagtatatgccaaagaaaaaacaaaaaaaaaatgaaaaagatgatcaagaagatgtagatgacttggaaaatatgaataatattgatgatataaattataatgatgatgtagacaacatgcagcatatgaatgatgatgaaagtcaattgaatagtattcaatcgaggaatgaaaataataaactaatgataaaaagagaaagtaaaaaaattgaatacaacaataatgttaatgatgagtcgataaaaatagaagaggataataatgaagatgatgataaacaaatggatagggagagtagttatccacataataataataataataataatgataataatgagaattataataaactaagtggtggatatgaaaattcttttaacgaaatatcaacagataatataagaaatgataaaaataaaaattctacctttgcagatatggtcaatcattataatagaacacaagctcctaaagagaaatgtaccatacgtttattcagttttcaagttatagatatattaaaaaaaatttttgaaaataataataaagatattataaatttattatatccttttaccaaaagagatggttataagaaattttttttatatgatatgggtgttagtggaaatagattccgaagtcaatctaaaggtatacatgttcgaacaaaaataacaaatacattatgtcgatttaataattttattaagttatgtataaatgcaaagaaaaaggttgattttgattatttattagaacataataagaaggatttaaaattatataaagatatgttttctgttttttctttaaaaatgaaatataaatttaataataatataatggatgatgatacagatataacaaagatggattttttaaaatattatactttagtatataataataaaagtgcatatataaatatattatttagtactttacaattaggtgttaatacattttatgattccactttaacagaaaaagttaataataaacatttaaaaaatattagtataaggcaaatattagataaaaaagaaggaattctaagaaaaaatattatggggaaaagagtaaataattgtgcaagaacagttatatctccagatacatttattgaaacaaatcaaataggaatgcctatagaatttgcaaaggtgttaactatagatgaatatataacacaaaataattttacttatataaaaaagttaatagaaaatggaccaaatatatatccaggtgcacttagctatagagattcaaatggtagagtatttaaactatcacataaatatgaagatagattaaaagttattgaaaaaatagaaaaattgaatttccaaaccgaaaattcttatatacttcatagacatgcacgtgatggagatgtagtaataatgaatagacaacctacattacataaattttctattatggcccattatttgaaaatatttgaaaaagaaaaagtttttagattaaattatgttaattgtagttcatataatgcagattttgatggagatgaaatgaatttacatttgttacaaacaccattagctagagctgaagcaacacatttaatgaattgtgattttctatttacaagttttaaagatggttcaccacttagaggtttagctcaagattttattcttggtggtttacatttaacatcattagaaactttcttaaattatgatgaatattgcaatttattgcaatgttcattgaactctttgatatct

SEQ ID NO: 388 - DNA, 2874 bp, Plasmodium falciparum
atgtcgggaagagaaggtttaatagatactgcagtgaaaacagcaaaatctggttatatacaaagatgtttaattaaatgtatggaatcggttatattacattatgacggtacggttagaaatgaagataattcaattattcaatttttatatggtgaagatggtattgatccatctaaaacagcttatttagatttatcaaaagatttattacacaattatcatctttcatttagtaaatatttaaataataatatgcatagtaaaatattaaataatcaagaattatttttaaaacatgaaaaagataatgatacaaaagataatgaagaaccattaattagtaaatataatccatatacatatattggtagtgtttcagacaaattcaataataaattaaataatactcttttatggaatgatttaaatttccctgaatatgaaaatgtacccatgaattttgatactttatcatcatctcttttaaaatcaaaatattataattctttatgtaatcctggggaatctataggtatattagtagctcaatcatttggtgaacccgctacacagatgacattgaatacgtttcatttagctggtacagaaaacgttactatgggtattccaagattaaaagaaatatttttaacatcaaaattgacatctaaacctatgatatatgtacctataaaattacaagtagataatttaaaaaatgatgcaaataaaatgaaaaattatattacaagtattgcagataaaattttaagtagttataaaagtatatttttaacagatgttatatatggtattggtgtcgataggaaaataatattaaaagaaaatcagaacgaacaaaaacatactattaatttatcagatattataaatatgaatgatgaagaactaagtggagatacccagctagccaaaataaataatgttttaaaaaattgtaatattaattttgatatgaaaaaagaatggaattatgaaattataattcaatttgaaaatttatatcatttttgtaatattaataagcatttaaccatatcatttatactttacaaagtagtaaatgcattattaaattcggtgttaaataaagttcatgaaacttttgtatttcataatttgataaatatgaattcattaaatcatgaatattatgatgaattatatgatttcataagtaaaaaaatgtcagaagaatttaattttaatatggataaatatgaatataaagatgatgaacatcaaattaatgcaaagttaaaattcatggaaaaagaaaatgaacgttatgattctaaaagaggaacaaataataatatatcaggtgaatatcaaaatgcttctcatactatagctagccatatggaagatgactctccaatgaaatcatataatgatatttcaaataaggaaaatatgtctccttatgacgatggaaaaggaaaggatggcgatcgtgatcaagatgatatgtctgacattgaactcaaggataattctgaaaaaaattccaacagtgatcaagcttcgaaaaatgctgatagtgacacggacgaagaggaagaagatgatgaattaaaatcagagaaggaaaaagaagaggatgaaaaagaatatgacgaggagggagaaagtgacacgaacagtaaaattgatagtgatcataaaagtgatagtgataataaaagtgatagtgataataaaagtgatagtgatcacaaaagtgatagtgatcacaaaagtgatagtgatcacaaaagtgatagtgatcacaaaagtgatagtgataataaaaatgatagtgataataaaaatgatagtgatatagatagtgatagtgaatcagagatggtgagttcaaataaaaaagaaattataaatataaataataaagataattactatactaatagaaattctagtaatgaatccaaattatcagaatgttccaatactaaaggtagtactgtaaattatttttcatccgaaacaagtgctacacatcatatattagtagatgaagaagaatcaggtatttttcctaatttgaaaaataaaaaattaaataatatgaatgataataaaaatatgtcttcaactaccgtttcatcttcattatcatcatcatcattatcaacaccattaaataaaaaaaatattgaagatgatgaacatataaataatattcattttatagaaaaaaataaatataatgaagaaatggataataaagaagaatttattacaaaatcatttaccagattatcttatgattataaaaataatattaatttaatatcttcagatgatgatcaagaaaatattgaagaaaatgaagaaggacaaaaaatgaaaaaaagtgaacaaagatatgttaaaaatattattgataaaatcaaaagtagcctactttgttttattaaaaatatacatttctcacctgtaacatggatcttaaaattaaatattggatgggatatcaactttttcccatatcctatcgattttttaaatcatatcaaatcagaaattaataaagaagttttattcaaagttaaagatctaaataatccaaaaattttaaagggtaaagatattacacatagtggagctgaatatgaattacaaattgaaggaaaaaatatttataaattatataatattaaagataaatatattgataaaacaaaattatattgtaatgatatttatgctattgttaaaacatatggtatcgaagcaggaagattatgtattaccaaggaattaaaaaaagttttcgatgcttatggtatacaaatcgattttaggcatttgtcatttataagtgatttcatgacccatacaggt

SEQ ID NO: 389 - DNA, 2796 bp, Plasmodium falciparum
agtgaaagaataaaatatttatatacatatatgaatgataaaattaataatatgaataatattaattataaatcatatttccaattatgtaattcaaatgaaattccaaatatacaatttataaatgttatagatatacaaaaagaagaaattattataaatggtataacacgtattaataattatattaattatttaaacgtttggatacaaaatgttaatgattgtataaattatgtaacaaattgtggatataattttaattatttatctaacctaaataaagtaaaaataaatattaatgatttaaataataatattgttgatgttaataatagtatacataatattgaaaaggaggatatatttaaatcattaagttatccaaaggatcattccacaacttttgaaggtattcataacaatatgtcccataaagaaacaagttcaattcaaaacaaaggcaaagaaaaatctaataacaacatcaaaagcgacgacaacaataataataatgataattattgtgttggagattatttagaatttttggaatatgattttattgacaatccagatgaattgaaaagaattccttatagatattctagtgattttaaatcattccatatgtttgaatattttagaaaaaataataataacgttattgtttctttacaaagaatctttatttgtatgcagttatattcattagttctttgtgccaaaaaaaaaaaagatcattttgaaaaatatacatcagatgttaatttaaatgaactctattataatgaaaaggataatttccatgataatatgaataaatttaaaggaaagaacaataaatataataaaaaacaagaatattataatcaaaacaattatgattgtggtgtaaaaaattcttattcatcctccttgtcaacagctgttgaaacattaacagctaatggaattaaagaagctaaagatgatgatttaaacaaatcatctttaaataaaaagaaatgtcatgataaagataataacgatcaacctcattatgttagtaccaatagttcaaatagtgatgatgatgatgatgatggtgataataataataataagaatgataatatggatgatgattcgtattatgaaaggaatagtatttttggagataataatgatgataaggatgatgatgatgatgatagttatttagataatttttctgattctgatgggaaaaaaaacgacccttcatataaatatgacatagaaaataatgaagaaatgaaattttataaagatttagaattacgtaaaaaaaattgtttatattattatagaaatgccctcttttataatggttcatctatgataccttgtgaagaaaataaacattttactatccctttaaaaggtatagataataatggtgcaaaccctgaaaattttgatgatggtacagaaaatatgtgttcctttttaaatatgtttagcaaaaatgataattatttgaatttatttaaaccattaattccaaatattaaaattttattatttagtttaaataaaattttatttaataaacatagatgtaatgaacccattagaaaaatacatgaagagctgtttaaaagaatcgtttgtgatgtagcaagggataaaattaaattgaatagaaaaattaaaaaactgaagaaacagaataataaaggtgatattattaatgatttaattaatgatttaaaggaattacgtttttttgaaaaaatatgttatgagttgtttaaattaaaaagtaaaaattatagtgatgatgaagatagtaataataggatggaagaaagtgagtatagtgaaaattctaatgatttaagttatgatgaatttgattctaaaatatcaaaatatccaacaaaagtaggaaatgaagggaaaaaatcaaaagataataataataataataataataatatgatgggtgatgatgataataaagtgaataaaaatgaagaaggtaacgaacaaaatgaaagtgcacaaattaaggaaggtaaggaaaagaaattaagggattttattcagaaggaagatatacgaaatgaagataatgaatcttatgaatattacaatgatcaaggtaccgagaatttagatgatatgaattcagatgaatatatgaataataataataataataataataataataataataatataaaacgtttagatgattcatataataaattattgaaaaataaaaatattaattcattaatttataatttagtaagtaaattaaaaatggatttttataaaaattatattatttgtgataaggatatttttaaaactattggaaggttatgttttagtgaaataccatatgtattatttttatatatggattgttataagagtttaggaagaggtgatttggttgatatacctttatatttagatgtatttgaagaaaatgaagaaatggaagatgatagtaaaggtgaaaagaatttagtatattctataagaagaaataatatgagaaataaaggagatggatcatctaaggaaaagattacttatcatttatatgctctagttatatcacaaaataaaaatccaaataataatttatttatacctagttacaataaagtgaatgatatggaatttaatataggaaatgattgtaatttgaattcttcatcttatttaattttaaaaccacaaataaatggaccatggtatcaaatatataaaaatagaataacacaattaaaacaagctaccgattttaatgaa

SEQ ID NO: 390 - DNA, 708 bp, Plasmodium falciparum
gatgttgcgaaggcttgtgctgagggcgaaagtgttaatgtgctggacattttgggaggagataatacgaatgttggcaaattgaatagcaataaatattatgacaacttcatttatggtttgaataaaaatgatgatttttacaacgctgataaatatgaagagttaaggaagaattataattataattataattatgaggatatagatatggatatagaaatgcaaatgaaaaattcttattgttatccaaatgagaatgtagaaatattaagataccatttacataagcttttatacaatttagtgatacatgtgtgtaaaaagcagaatacattatttttaaaatataaggctaatggtgtgatattaagtgagtatgagatgaataagcaattatgtggtcctgtgtattattctagtgatttgacgtatgaagattttattacatcaaggaaaataaatttttttgaaaaacagcagataaaaaatagtgtatatcttttatcccaacatggaatatatggaattaaatttatacacttaacaaatgaatggtttaaattgtataaatgtgagttacgtcctctcatgaaaatatgtcattatccaaaaattggtcagatgatttgtaatatgcctaatgtatatgtagtgggagatggatttgatatgaaatatatacccaatacggaaatggataatgaa

SEQ ID NO: 391 - DNA, 339 bp, Plasmodium falciparum
agtgtgtttacaaacattgcctttataatttggatgtcctttttacttcttatgaatacttgtattacctttttttcctcagaaatatttttagtaggttggatcatcgacttactcaaacagtatctaagtttaattacgtttcctttttattttcgtatatttttatttttcattttgttttttaatttcctatgttcctattcatatgaaaagtatattataaaatattttgagaaaagggaaattcaaaagaaatataatcacaatcacatgagtagtattttttgttcgccccaagaactggatactacaaatgttttcgtaacttgtaattag

SEQ ID NO: 392 - DNA, 906 bp, Plasmodium falciparum
atgaaggaaaattatatgattagacacttatttaagaaatatggtttaaaatgctataacagtatgagtaaagggttgttaagtaatataagaaatggaaattctatagtgctatatgaaaaaaatgtaaataagaatttaatgaatttattatataaaaaacattataacacatataaaaatcgagttttcaattcagctatgtataataatacaccttcgaattatatgaacaatccagaaaataataatatgaaccatttacaaaataattctaattataaatatgaaaacccaaataactattatcaaccaaaatataataataatctaaataatgaaactaatgaaaataatacgacgtatcaatatttcagtatattcggaagtacagctatgtgtctaatcaaacccatatttcctgattatataacaaacaaaaacaaagtaactatatatggtaaaggtggatttcaatttgtatttatgagaaaacaaagtaattctaataaatatgacaaaaacaataaaatgaatatatttattaaaataaatagtttatcaaatgttttatctttaaatgatgtagagaaattaaaaaatcctataatcatcaaagggagtaataataactatttaacaattgataaacataaagagaaaaaagatcatattgtaataaaatataaataccaaccttctaatagtcctgaaaacaattttaatgatatgaataatatggatacagacattaatgaaaatatgattattaatgatgttaatgatgaaaagagaaacaattttgaagaattgcatgtaagcttttccttttccgaatttctactctttcaaaaagctgctaacttattattacctcaattaataggatgggcaaaacaatattaa

SEQ ID NO: 393 - DNA, 2661 bp, Plasmodium falciparum
acatacttaaatagatataataaggatggtgattactcagtaaaaatgatttatccttatagctctatttattacacattaagacataacaatgaaattgaatcatcaaaaattgctttaaaaattgtaggagtacaaaaaagttcctggtgtataaatacaataaactcttttattgacaacgttgttatattaccatatagaatatatggagataatttattatcacgtaagactaaaagaaatactaaaaatgaaatatttaaagatgatatgtcgcaaatgtcatatcaaataaatgattcgtcttctgataaattaagttccaaaagtgattctattaattctaataatatggaacgttatataaacgatgatgaggaaaatgataatttattccttggtcataatttgataaataaaaaactatattcctttttaattatacgagataatggtagtagagctattgtgattacggaaaaatataatttggctagaaaaattgttagaaccaaaaattttagtaaaattcataaattgatagctttaaatagtagaaaaaaaatattattatcgcaaaaaaataataataagaaatatatattaaatcgtaatatgaagaattttatttattttaattttccaaatgtaccaataatatataaatttaatatacctagaattacctttacatggatacatagacaagatgttattatagctattcatttaacccaattgaaatataatggacatatatatcctaaagaaattgtaaataacgacattacagaaatgtttacacctataaatatcttaaagaaaaaagaattaaacgaatatgtacaatttgttttcttaaacagttatattaattccatatttctaattgaacaaatacatatagatcattttgtaaaaggtgatattcctgttattttgaaaagtactaatattgaagaagatgaaaaagaaaatatctttttatatatacatataaaacaatattgtgttgattcattaaaacaagcacctatatatcaaagcataacaataaaaatatctcccttaaatgccaatattgaactgttagtaattgaacaattaattgaaataatagaaaaagaaaaacagttattattattatatgaaaagaatgataaatctttaccaccactcgtaagtacatctaaaacagctaaaagtgcaatcaatacaacattaaaaatttattcagataggaactttttacaaatgttatatatggatgaatatataaaacataaaatgggacatgatgtttcggaacaaaatatagaaattgaaaataatagattaattaatagtgtaaacagaattgataatacaagttataaaatgataggtcataaaaaaagagtagataatatatataatgatattaataatatgaacatcaaacctaatgcttattcttattattttagctccactaaagctcgaatgattaaacataataaaattattaatattaataatatatcccctaatatattttcagatgatagtactaaaagttctaattctagtaaatctagtcataaaaataaacaatatattttagaaaagaaaatatgtaaattattattgggttattataaatataagaaaatacataatttaattaataatactttttataatataaataatataaatgatgaactattattaccaataaaaattcaatattttaaaaatagaaaaatttttatgaatgcattttcatcccatttatttttacatccaaatccaagatggatagataacaaaagtaaacctgtttatataagagaatttaaaattcatccaatagaaataattgcatctataagaacatcagaacatcgaatttcaagaagagttttacatatagttgatgctttaccattggatacaccttctatgcgtatacgtttaatatcacaaaaaagaaattatattgtttgtacatgggatggattatttcaatcattacgaatatcttattttagacaattattaagacaatctttaccaagtgcatggttatctaatccatttgctattataaaaggttttataaaagggttgtgtgcattgtataaagaatcggttagaggtgttaaaacaagttccaacttttttgatggttttatgtcaggttttaagtgtggaattattatattagttgttaatactgttggtgggttatttcaatcattgagtcatatgttaaatgtatgtcataaattaatgggtggctcaagacctagacctcctagtattttagattcgatcattttaggattagatggattaattttagatacattctatagaccttgggtttccttagtaacacaacctatcatatctattaataagggaaatagtacttttaaaacaacttgcataattattggttgtattcttcgatgtatcttttcacctgtttttggtttattaaacttttccgcatctataaccgaaggtttcgccaatacattaataggagactttgagcgattttctagagttcaagaacgagcagagtttgagacagaaaagattcataaatccaacacgacatttaaaaagggcaaaacattaaaaaaagtaggaaaaaaaaaggtttaa

SEQ ID NO: 394 - DNA, 903 bp, Plasmodium falciparum
atgtgttctacaaataagaatttagcttgctgcaaaggagataatgttttcgatggacaaataaatggaaatgaatcatacccccaagtagtaaataaacaattaccacctaaggtattagaacccataattcaaaataaaatagttgaaatacccaaagaagtatatcttgaaaagattgtagaagttcctcaaataaaaactgtagaaagaatagtggaacagataaggcccgttattaagtacaaaaatgtgtataaacccaaaattgtatatgttgaaaaagtaaaaaatgtagataaaattatataccaagagaaaattgttgaagttccacaaataaaaactgttgaaaaaattgtagaagtcccagtatatgttaacagagaaagaattattactgttccaagatatatggttgtagaaaaagtaatacccgtattaaaaacatccaaaagagaaagtataatggaagttccagaagttaattgcccacacattgatataagtaaagaagtagaagataaagaagaaataccaattaacgaattaaaagagaaccaaaccataagtcttgctgatgaaaaagaaatccaaatattaaatgacttaactagccaaaaggtagattctaatgcaaccattaatatggaaggtgaacaagatacaactgtagatactattacacaagaaaacttctgtggaacagttagttgtaatttcttaccaaattatccaaacttctccaaaattggaaacccattatgcaaaggaggtccagaaaaagaaaaacgtttttcaagtatcagcatctacaaatcaaaggattcaggattcccaagtataagaattgcaaaaactccacaaatgttccaaagaaatctttactgttcatatgcttaa

SEQ ID NO: 395 - DNA, 1455 bp, Plasmodium falciparum
gtgggtgatgtgaacgatttagaaaagaacttagaattattaaacgaaggatgcgataaagaaattgctttgatagaaaacgaatgtactaatgggaatcgtggtgttataaataattatttggaaagtgtggaattagaaattgatgaatttcaagaagcaatgaatgaatataaaatagatcagatgaataggattggaagtaatttagaaaagaaaagtattgtaggtttaagagattggtgtaatacatatttattagataagaataagatgtatacttttagtgataatatagatgataagatattaaaattaagtagatattattatcagaagaaagattatgtaaaaagtaaacaatatttattattatatattttaaatatatctgaaatgattataaatatatctgaatcatcaaaaatgaaaacatgttattggggtattattagtaatattataaatagtttttttatgaatataaataatgatgattatttattttctaaaaatgaagatggtaaaattatagtcaaagaagatataataaatgaaatgaatgtttgtattgaaagtatagttaaattaagtcaattattaaataaagaaaaggtttcaaaaaatgaaattattttacaaagaagttggttaatacactggtctctaattattattttccatttttttatgtatgttatatatgtaaaaaatacatatccaaaaaataattctttttccatgttacaagattggtttattgatgaaaaaaatttatctattttaaatttaatatgtccacatataattagatattattgtgtttatgctatattctatagaaatagaaaagatcattttgaattaatattaaatacattaaattttattaaatcaaaatacaatgattcttttacatcattattaatatccatatttacagattatgattttaatatggcacaaacatgtatagcaaccatcggtacattatgtgaacgtgatgttttcttatacaaattaaaaccttatattgaagaacattgtagatttattatttttgaaacatattgtcgtattcataaatccattaatattgatatgatttctagtaaagttaatttaacaagagaacaagcagaaaaatggattgtaaatctaatcagaaatgcaaaattagatgcaaaaattaacagcgaaaaaaattgtatcgaaatatctacaccaccacctaatctatatcaacaagttattgacaaaacccaaaatcttatcatgagatctaattttattgtacaagtattaaacagatcttcaaatgatgatcaacaacaaatacaaaaaaatttaagattcaaaaataaaaatgaaaaaaatttaaaaaataacaaaagaaataaaaactttaatcacatgtaccacatcaacaacaaaattgtggcacctgacacataa

SEQ ID NO: 396 - DNA, 366 bp, Plasmodium falciparum
aagaaagaatatgatgtaaagtccaaaatgagcgacaaggaaaaagaaataaaaatggaagaacataatttaatatgcaaatattgggaaaaacaaagtgaatgtatgagtatgttaatagatgagtggaataaaatttcagatatacttgaatccattaatattgatcccaataatattatgagttctttattatcattatatggagaaaaaacagttaacgattttcatttatctcttgaagaaataaaaaaagccaatatagaattaaacgtaaatactgatgatataagtatcccagaaattaatgaagaagatataaataagtttgatccttcgaatatgactatactaaatttaatagag

SEQ ID NO: 397 - DNA, 408 bp, Plasmodium falciparum
ggtattaaacaccgagttgggttattagattatctgaacaaagtagaaataaacttgaacgcctttgcaaaaattattgaagggagaatgatatcaaatgatgacgtaaaaagtcaattattatccatacaagatatgagtgaagaagggttactttcgaagcttttagaaaatttgaaatgtaataaaattgatataaatgctgaatcttttaaaacaccaacttctttttttgtttctcatcacttacctatgacagtatgttcatatagtgaccattcaaataatcatgaattaaaggatatgaatgaaactaatagtaatgctgatattaaagatgatgaaaaaaaagtgactgatgaaaatgatgccatagatactcaaaataaaaatgaacacaacgactaa

SEQ ID NO: 398 - DNA, 546 bp, Plasmodium falciparum
atgagattctccaaagtattttcttttttcgcctttttcattgcccttaaatattttaacagatgccttggtgatcaattagatatgggttccgtacacaataacaattccgttgtaggaaactcatcatcacattcaccatcatcatcatcatcttcaccatcttcttcttcttcttcatcatcatcatcaccatctgcatcttcatcttcatcctcatcatccccagcttcctcatcttcaagcccatcaagcacatcagatgacagcaaaaatgcatccttagataaaatcgatgaagaactccaaaagaaaaagaaaaacgaaaaattacttttaatatcctctattgccacaggtttagccgttttagtaggtggaataataggtactgctttatacgcaagcagaaaatcatcaaaagcctgcaaaaataacgttgacgatttagattcagatgttgaagaagccgatgttaccgaggaatcagctgttgaaaccaagaaagacgaagtcaaaaccgaagaacccaaaaaagaacaataa

SEQ ID NO: 399 - DNA, 1329 bp, Plasmodium falciparum
aatgtacttgtttctaataacaatgacaatagggcagttccatttagcaatatctgttcaagaaacttatgcgaaaaaaaaccactaaatgttgacatgaaatacgtaaaatcaaaatgttgtgattctataagtgaatcaaatatggttgatcgattaaaggtacaaatgcttttgaagaacgcttttgaaactgaagatggaaatgtatttgaacagaaccatgatgtatttaaggatttattaagtgatgacatgtggacaagattccatttaaatttacatgataaatgtgatattaagaatggaaaacacgaaatggataatattatgaataaagaactatttaaattatgtgaacttgatgacaatagagaaaaaatgatgaatttttggaaagaaacttttgaaaatgaaaaaaagaaatacaatcaaatcatttatgacttatatatgtatcttgaattcctaagaagaaaaaataaagtaccacatgagtatgcaggcaagcaatgggatgattgtataaaaaaagtaaaggaaactgaagacaatgctaaagttttattagaagatatatttaatttttggcttgaaaacgaacatttagacaagaacgaatttataaccttaatatctgcatgcagattattatggagaaaattagctgatgatatgacaaaagcttgtaaagtttatatgggtaaaccttttaaggatgtatataatgaaaaaaaaaaaatagtaaatagaggtatagatttatcaaacgttaattatgatgatcattttaaaaatggaaaatttttaaaaaactattctacgcatgaaaatacctacccaactttgaaaacattgttagaaaaatatgctataaccgatgattattcaccaccagatgtatttggtaaatcataccctcctttagttgaagaaatgtcaacttttcaaagtagttcaatagaaaccaacgacgaagaaaacgaaagtattgataataatgaagaaaatatgtctgacagaccaaacagtttatctcatgataaggatcaacacctcgatgaaacacataatgaacaatatggattatacgtaaaagaaatggaatctaaagttgaaaaattagctgaaaatcaagttgaaaaggaatttcaagaggtaaatgaaagatttagtgaggttgcaaaacgatttaaattaaccgagaaaactgtcaacttttatgagctaggtaatgattcacaagacgattctgatgagcaagaagatgaaaatggtgaagataatgacgatgaagaacataatgatgaagtctctaacaatcaataa

SEQ ID NO: 400 - DNA, 1077 bp, Plasmodium falciparum
atatataatcaaaggaaccataacagcaccacacatcatacattaaaaataccaatcactagattattatgcgaatgtgaattatatgaacttgccaactatgataatgaccctgaaatgaaagaagtcatgcaacaatttgaggatcgtacaacacaacgatttcacgaatatgacgaaaggatgaaaactacacgccaaaaatgtaaagataaatgcgataaagaaatacagaaaattatattaaaagataaattggaaaaagaattaatggacaaatttgccacactacacacagatatacaaagtgatgctattccaacatgtatttgcgaaaaatccttggaggacaaaatggaaaaagaatgcttgaaatgtgcacaaaatttgggaggtattgttgcaccctctacaggagtattaggtgaaattgctgcacttgctgtaaatgcctggaaaactgaggcaattgctgccgctacgaaagctgctatagctaagggtacagctaagggtttggctgcaggtgctgctaagggtgtggctgaagtaattgcacaagtagaatcacaatttcgtttatcaactataggtgttaaggaattggggtcaatttttaatgcatcaaattatacgaatgagactttcattagtggatatatttatgctcaatatcaagggtcgcaatgtggatctctttctatgttacttggcaagagcaagcctttttgcacttttgtggaaggacgaatttttgctacatcggtacgtgtaggtaggagtttttcacccgaagattttataaaaacaactgtacaaactatcgtcaaaaatgccaaaactactgctgaagctacaaaggctcaggtggcttccgctgaaaaagcagcagttttagaaacaagcaagaaggctatagaagctacaactactccttactatactcctataatagtatcaatagttgcaatagtggtcataattttaattatggtaataatatataagattttacgttatcgacgaaaaaagaaaatgaagaaaaaactgcaatatataaaattattgaaagaatag

SEQ ID NO: 401 - DNA, 2106 bp, Plasmodium falciparum
atgttttttaacgatggggataaaaataacatgtttaataaaaacaataacatgaataataatagcggaacaaatataaacacaaacgcaaatacaaataataatatgtggaaccttcaaaataataatttaggtaataatacattttttggaaataataatatgacaaatcaaaatgaccttaataagaataatagtctttttggtaatagcccaaataatatgatgaaaacaactggtttttttaacaataatactattggtaatcatccaaacgatataaataaaacaggtaatctttttggtaacaatactggtttaaacagttcaacagatataatgaaaaataatagtttttttggaagcagtatcaatacacaaaatgatttgaataaaaataatatgaacaataataataataataataataatagtaattctttttttggaagtgcatttggtaaaactaatgaattaaataaaggtagtaatcctttttttgggaatactacaactgttaataatgatttaactaaaagtacaggattatttggtaccactactaatagtactactattggtggtattaataataatgctacatcaaatgcttttaatccaaatttattcagtgctgccaaaaaagaagtttttcctgggttttctacgggtattattgggaataatactagcaataattccaatatttttaaaaaaagtaccttgggaagttctatagcattaggtagtcaattaaatgaaggtagagcaactgaatctggtttattttcaaaagaacaattagaagcagccaaacaaatttttgctaactcatcaagttctttatcaagttttaataataaaatgggtactggtacaacatcaaatacagcaatcaatacgaatacaacaacaaatactactactacaaataataataataataataataaattaacatttagtggtggtttttcatcaagttctagtacctttgctaaaagtaatgtaaacccctttcagactatggctttacaagctactacccaaaatgataaatcttcttcatttctaaaaagtaataataataataataatgtatttcattcatcaagtgatccaaataaattaaacacaacaccatcaccatttggtttatcatctattggaaatctaaatacaaacaataaattaaatagctttccagactttagtcaagctaataaaacatttctacaaaatgatagcttattttcccagaaaaataataatagcatttttggtaatacagctaataatacggcaacatcaactggtgttgcaaaaccattagttaccaattttaattctccatttagtgcttttggtaaaacaaataccagtgatatatttaaaactaatactactgcatcaactacaaatgcaactgcaactgcaactcctgctccctttggatcagcatttggagcgcaaaagaataatgatagcttgtttggaaataatgcattcaagctttcgacagaagtaaagtcaaacgaaagcccattcctatttaacaacaacaacaataataataataataataataataatgctacaacaagtactagtacatttaataatgccttttccttatttggaaataaaacagaaactaaaaataatttccttacccctactactaccacaaataataataataataataataataacaatgtagtcaccaatttgttagaaaccaaagtaacgacaacagaaacgactcccactgttcccactttaaacgttttagataaaggagccacaacaaatgaatctgtatctccatctaaattggaacagacagttaatgtagttcaaaaccaaaaggagaaaactacacaaatggagaatgataaggaaaaggagaaagaaaaggaaaaagaaaaggaaaaggaaaaagaaaaggaaaaagaaaaggaaaaagaaaaggaaaaggaaatcgaaaaaaacaatgaaatcgaaaaagacaaagaaaaagaaaaattagatgataataaaaccacaccaacgctaaatgagaaagaaagtaccacacaaacaaaggatgaaagtgtttccaaa

SEQ ID NO: 402 - DNA, 2487 bp, Plasmodium falciparum
atggctaaattgtcattaactattaacaatgttgatgatgatttaaagcgaaagattaagaaggcaaaatttgagggtgttgaagatctgaaacataaaaacaaaaagttgaccatttcttataacccgaaggttgtggattcttatggagtaatagaacgtataaaacatttggatattaatggtgaaattttaaaggatgataatgatataagtagtaagaacggaaatagtttcactttttcaatgtataaggaaggagtagaagaaaatgttgttaagaaggcgaatatatttgatgataatgagaatatgcaaaatacaaataattatattgataataatagtaataattgtaataatttatatggtataaataatagagataattatgataaattagattgtaatggtaataatgcagataacaattttgatcagatatacgatatgaataatatggtgaataattatacttatccaaatggtgaagatctttatgaacagcttgataatgcatatgatgataaaaattataaagacaattataaaaattatgaaaccaatcatcaaaaatgtgaacagaattataaaaattatgaagccattcatcaaaaatgtgaacagaattataaaaattatgaagccaatcatcaaaaatgtgaacagaattataaaaattatgaatccaatcatcaaaatcatgaacagaattataaatcttatggagataattatcaaaattgtaatgtgtctgaaaaaaatgaaaatataaattctaattataatagcacaaataataaaggagatttatatgatataaattattatcctaatcaagttgaaaaggttgaagaatcagaaggcgtagacgagaataggaaaagtagtaaattcagtgttttaaatttatttaataatattaaaaaatcaaaggataagaaaaaaatgaagaaagaaattaagaaagattatttaaatgaagattataataatttagataagcgcattttgttatctaatgatatgtataaaaatgtggagaataaaaactataataatagtaacgataattataatagtaataataattattattatgattataatgaagagaagctgaagaaaaagaattttaatttcagagactatgaaagttatagagataaacaaaatatttacatttgtgaattaaaaatttataatatgacttgtgataattgtgggaaaaaaattattaactttttaaaagataagaaattaattttagaaggaaatagttttgctacagacaataaaataaaattaaaaatcgatatctcatctgatattatacactgtaataataatgtaaaaatgtttgtaaatacaattatgaatgaaataaaagaaagtggatttaataatgatttattagatctttataaagatgataagaatcgttgtaatttatccgaaataacattatacatatacagagatgatataaaaaaatcatataagttattaaaagatattaaaggtattagtaatgtagaatatgatttaaaaaaagaatatatttactttttatatgaccctgaacttgttggaatacgttatattttagaaattttaaagaaaaaaaaaaatgttgatgcttattatgatgaagataaagaaaaatattttagaagtagccaaaataatgaaacaaataatacctggaaattaattgaattgtctatttgtattattataagtattatcattattgttttgaataagtatcaaatgaatatgggttctatgaatggtttttattcctatacaaaaaaattgttcgataatagtaataaaattgatacggataatatcaaacatccatctatttatcacaatataggaaatggtacccctgttgatcaatcgacattagatatatattttgaaaatgtaacaaaaggaaagactttaaatgaatatgttcataaacaaagtcgtcgtgatgaaaaaggaacattttttattaattcaaattttaaatttattaagaaaaacaaggattcccctataaatagaaaatgggtagatgatgatataaagaaaggacaaattttaaatggtaaaaaaaacaaaagtatagaatataataatactattaatatgttaaatgatcaaattgatgcaggtcattataataatcaagaaggtcataaggactatccattggataatgagaataatgtgtctaaatatatagaatgtacaaattcagaaaataggagaaagaattatttattgaatgaaaaggatgatgatgataataataaggaaaaaaatataaataataatgataataataatgatgaaaaaaatgataattttaataatgactacaataaggatgattattatgatgacgaacattatgatattatccccattggtgatttcagaaaaagcgatatatcagaaaaacatccagataataaaaaaggtgataat

SEQ ID NO: 403 - DNA, 2487 bp, Plasmodium falciparum
ttcagaaaaagcgatatatcagaaaaacatccagataataaaaaaggtgataatacaaaaaatggatattctcgttttaggaaacatattaatactaatctaaagaacaagaataataaaaatgagtccgatggagaagaagaaaaaggtaatatagatggtatatatattcttaaacaaaagaatcataaaaaagatatgattaaaggggaagaggaaaataaagataatttttcaaaaaaagaggaaaagtcggataatgaaaattcaaatgaagaaattgataagaattataattatttgaaaagaaaagaaaaggatcataacagttcaaatgatgaggataatataaatgatagtgtgttaaaagaaaacgtaaaggaagaagaaatacatgaaagtagttcaaatgaacaaagtgatagctatttgaaaaaaatagaaaagaaagataataaaaatataagtgttgacaataatgagaatgataattttttgaagaaaaaggaaatgaaggatgtaaataatgaaaatgaagaaaatagggaaagctctagcttattgaaggaaaataaaaagaaagataataaaaatataagtgttgaaaataatgagaatgataattttttgaagaaaaacgaaatggaggatcaaaataataaacatgtcggaagtaatgtaggtgatattgttttgaagaaaaataaaaagaaagataataaaaacacaaatgacgaaaataatgagaatgataattttttgaagaaaaaggaaaagttatataataatagttcaaatgaacaaaatgaagagaatgaaaattttctaaaaaaaaaggaaaatactgataataaaaatacaaatatccaagataagcaaaatgctatttttttaaaaaacaaaaaaaagaaggatgataaaaattccaaggaagaaaatgatgaaagtgataactttctgaagaagaaagtaagaacagaagataaaaatacaaatggtcaagataagcaagatgatatttttttaaaaaataaacaaaatgataatgtcaaaagttcacatgatcaagataaccaaaatgatgatacatttttgaagaaaaaaaaaataaaagataagaatgataattccaatgatgaaggaaatgtcagttcactaatgttaagtaaaaaggaagatgaaaataaatccaaaaataaaaagtgtgatacaaataattcaaaagataatataggtgaagacaaccttggggtgagtaaagaacaagatggtaaggatagccaagatgttaaaggtggtaagcatggacaagatgttaaagatgataaagatgaacaagatgttaaaggtggtaagcatggacaagacgttaaagatgataaggatgaacaagatgttaaagatggtaaacatggacaagatgttaaaggtggtaagcatggacaagatgttaaagatgataaggatgaacaagatgttaaagatggtaaacatggacaagatgttaaagatgataatgatgaacaagatgttaaagatgataaggatgaacaagatgttaaagatgataaggatgaacaagatgttaaagatgataatgatgaacaagatgttaaagatgataaggatgaacaagatgttaaagatgataaggatgaacaaaatgttaaagacgataaggaagacaaagatattaaaggtggtaagcatggacaagatgttaaaaatgataagcatggacaagatgttaaaaatgttaagcatggagatgtcgttaaagatggagaaaatgaaaatgactcatatgacgaaacagaagaagataattttttgatgaagaaaaaagaaaaaaaagatgaaaacagtacaaaggatgaaaaagaaaatatagttatgcgtaaaaataagaatagtgaaatatccaatgaagaaaataatgctacttatgaaaatgaaaatatttttatgaataaaaataaaagttataataattcatataaaaatgaaggaaatgatgattctcttttttcttttaataatttattttacaaattagctaattatagtatttatttagatatggacacaaaaattgttaaaggtttatcattaagattattttttatttttgtattaagttcttttgtatatatatattatggatttagttttgtattgaatggatataagaatttaaagaataatatgattaatatgaatgttttaatttcaattagttcctctttttcgtatttttattctttattacttttgttattttgtttaattttttctattgatttaaatggtattcctttatattttgattcatcagcattgttgatctgtataatgaaatttgggtgtgaaatagaaaattttctagttagcttttccaaaaaaaaaatggaggatttatatgaaagtacggcaaaaaatgtatacatactggagaaaaaaaatagatattatcaagacgaggaagga

SEQ ID NO: 404 - DNA, 2670 bp, Plasmodium falciparum
ataaaaaaagcacctacccctgatgaacatatttatgaaaaaattaatgataaggttcaaatagttagttcgttacaacagcaagttttagaattgttagaagattatgaaaaaaaaaaaaacaatgaaaatgtaattgcacataaaaaggaagttttatctatcgataaaaataatcatgtattaaaagaagatgtacctgatgatgaatataaggaagaaattgaattagaaaaagaagaaaaaaacaattttaaagataaagaagaagaggaaaaattaaatgaatttaataaagaagtaaaaatacagaaatcaaaaccgaaaccgaaaaagaattacaacaataatatatataataataataatgagaagaaggagaaggagaaaaggaaaaatattttattcaaagggggcattggaaaagaagtattaaaattatacttaaaaatttctaaatttattgaagaatataaaaataaattatttaaacattggttatcgtacacaaaaaatatgaacagtttaaatgtaacggttttcgtaaaacatccaaagacaaaaaacattatagtaaatttcgataatagaattaagaaaataataagagaagcaaaaatatttctttcttttgaatttgaattacctgaagaaataaagaatatgatatctcaagaatccaaaatatatagtttttattataaattttataatatattaatattaataaaaaagatgaaaagtaataagaaacttggtattgatttaagtttgaaatatttttttatatatattgatcaattaattttgccattcctagtaaaatatacttggaataattatgccttagaagattcgattgataacttatttaaagaattatattattttgatgaatctataaattctttatattatattataaaagatcatatatattataatataaaattactttataaaatccttgattataaaaatgaaagattggttatacatagacaaaagaaaatgtttaataaaagaataattttatgtaattctatatcgaagaaaattcaaatagctatttttgatattttaagtaatatacaatatgtatatgaagacaaattaaaaagtataataacaaaggaagaaataataaatactagaaattattattatgaaatatttttgtctaccttaaaaaaaatatacttaaaaaatattaagattttaattaatacatggtcaaattttgatgataataataataataataacaaaggtagcacacaaaataatatggacaatatgatgaattataagaacatgaatagtgatataaataataataataataataataataatgattacaattacaattacaatgttgttgaaattttattattaattcaagaaaatgatattattattaatccttccattaaaagcattaaggaaaatataaaaaaaattatcaacgtttctattaataatttaatatatattgataattggataacaacagaagatttaatacgacaatttcatgggaactctgaaaatgaagaagagcatgatatggaagatttatctaataaaacaaaaaaaagagatcaaattaaaaaaagaagcgaacaaaaaaatgaagaaaataaatttttatcaaatgatgaaattaaaagaaaaaagaaaaaaaaaaagaatatatttgaccaagttttagatttctcttatttttcgaaaaataacttgaatgagtcaggaaattctatagaagaagagttaaatatggaaaatgaaaattgtgtggataatttgaattattactttgaattttatgagaaaataagagaagataaaaatatcgaaaaagaattattaaagttaaatgataaattatttgcatttcaaaatgcggttgacaattttattaaaaagtttgaaaagtataaatatattataaaaaatttccacttacaaaaggaacaaaataataataataataacaacaatagtgataataataataataataataataaaagtaatgtgataggggattataataaacaaaaagatatgatgaatgataaaatattagacatggataattatatgaaagatagagaagatgatgaggaaaaagaaagaaacttattaaattttacagaaaatgaagatgatttagaaaatgtaaatatgaagagtagtacaaagggaatcttagacgatgataatattgataatagtgatgataatgacagtgataataataatggtgataatagtgatgacgatgatgatgatgatgataataataataataataataataataataataataataattttaagaaatacaaagaagaagaagagaaaataaaaaaatttatagaaataaaaaaagatataaataacatagaaagttgttatatgctaaatatgtttaaattcaatttagaaagctttaaaatgtatttaataaatattattgaaaatgaagcattagaatgtgctaaaaatgttattgaacctcttaagaaaaaaagtgatatgttaattaaaaaaattaatacattaaaaataaaattaaaaaaaaagattatagacatagattcattatattatgttattaatataataaagaaaatacatatttttgaatcaactattgat

SEQ ID NO: 405 - DNA, 2670 bp, Plasmodium falciparum
gttaagaaatatgatgaaataaaatgtttaaaagaaagtgtggatattggtttgaaaaaattaaacgaggcagctatggacgtacagaaaatgagagaaagtttaacatcggaagaagagaaattaaaagaatccgatgaacaaatgaatatattattagaaaaggtaaaggatgaatcactcaaagcggaaaaacaaagtgtagaagtttctaaatttagagataaatgtattaaggaaaaagatttaattttaaaagatcaagaagaagcagataaagatttaaaagcagctttgccatatttacatgaggcagaagaagctattaaaagtataacaggaaaagatatcactgagttgaaaagtatgaaaacgccatctgatattattagaatagtttttgatggtgtattaatattattacaagggaaattgaaagaacctaaaatcgatgtaaaatatgtcaataaacaacatatagattttatacaagattcttttgatgaatatgcaaaacctctaatggcagatattagatttctaaatttattatttgatttttctaaaaatgagaaagataatattaatgaagaaactattgaattacttaaaccatatattcaatctactttttttaaaactcaaattgctaaaaaggcttctgttgccgctgaagggttatgtaagtgggttggtgctatggctatgtataatcaagcttcaaaaatcgttaagcctaaaatgagttatttaaaaattcaaacaggtagattagaagatgctttaaaacaattagcagaagcagaagattctttgttgaaagcacagttatttgttgaaaatttaaatttagatattgaaaatatgtttaaaaaaaagaaggcgttagaagaaactgctttaaaaactaaacaaagaattgaacaagcgaataaattaattaatggtttatctagtgaaaaagatagatggacagatgattctaataatttttcaaatataaagaaaaaaattgttggtgatgtttttatatgctcttcttttataacatattgcggcatgtttaatacagaatttaggaattatcttatgaatgatgttttttataattatacaaagaatataaaaaacatcccagtatcatctaatatagatattataaaatatgtgttatcttctgatgatacaaaaatatgtgattggagtgtacagaaattaccaaatgataaattaagtatagaaaatgcattgatttgtgaaaatagcaataaatatgtgttattaatagatccccaatgtcaagcaagtaattggattaagaataaagaatttcagaatgacctatctaatcaaaggtgtataactacatttaatagtactaaatttaaagataatttagaatattgtttaagtgaagggaaaacattattaattgaaaatgtcgaggaatatattgatcctatattagattcagttttagaaaaacaaattataaaaaaagggaaaaagaattatatattgattgaaaataatttaataaattttgatgagaaatttaatttatttatgaccactaatatacctaaccctaattatagtcctgaaatttatgcaagatgttgtgttattgattttacagtaacagttaaaggactggaagatcaattattgggtagagtattaacagaagaacagaaacatttagaaataacattgaaaaatattatgatagaattaaaagataatacaaaatcattgcaagatttagataagcagttgttatataaattgaatacaagtagttctaatcttatagaagatgaagaattaatagaagtattaaataatactaaattactgtctaaagaacttgaatcgaaattaaaagatagtaacgaaaagaaaaaagaaatcaatgaaaaaagagaacaatatagaagtgtagcattaagaggaagtatattatatttttgtatcgttgatataactaatgtgaattatatttataatacatctttacatcaatttttggaacaatttgatttatctattaaaaaagcagaaaaaggacagcatattaaaaaaagagtagaatcgatattgtatacattaacaaatttaataatatcatatatggaaagatgcctatttgatcaccataaaattatatttaaattattaatatctttgaaaatattattatatgataacataataagtaataaggatataagtttttttctaaatccgttatctcactatagtccttcaaatgacatgaataatgagatgaccaatacaaatatgttaaatgatccaatgggtgtcttaaaaaataagaagaataagaaaaataataaggaaatgattaataataataataacatgagtatagcaataaacgcggtgataaataatactatggatagtagttctatgaataatgatactatgaatgtttacttgggaaccaatgaaaatgataaaaataagaaggatacaaatacaagtgatgttatgtcatcatcatctagcacaaaaactggatcccgaacgacaacaacaacaacaacaactactactactaataataataataataataataataataataatatggatggtaatagttctaataatgctggagatataaattcatgtaaaaat

SEQ ID NO: 406 - DNA, 774 bp, Plasmodium falciparum
attcaatgccaaaatgtaagaaagagtttagatttagaagtagatgtagaaacaatgaaaggtattgcggcagaaaagttatgtaagatcattgaaaaatttattcttacaaaagatgatgcaagtaaaccagaaaagagtgatatacacagaggtttccgtatcttatgtatattaatatctactcatgtggaagcttataacatagttagacaattattaaatatggaaagtatgatatcattaacaagatatacttcattatatatccataaattttttaagagtgtaacattattaaaaggaaactttttatataaaaacaataaggctataagatattcacgtgcttgtagtaaagcctcattacacgttccatccgttttatacagaagaaatatatatattcctgaaacattcttatcattatatttaggattatcaaatttagtatcttcaaatcctagtagtccattttttgaatatgcaattatagaatttttagtaacttattacaataagggttctgaaaaattcgttctttattttatatctattatatcagtattatatatcaacgaatattattatgaacaactttcatgtttctatccaaaagaatttgaattaataaaatccagaatgatacatccaaatatagtagatcgtatattaaagggtatagataacttaatgaaaagtacaagatatgataaaatgcgtacaatgtatttggatttcgaaagttccgatattttctccagagaaaaagtt

SEQ ID NO: 407 - DNA, 2514 bp, Plasmodium falciparum
atgaagaaagataataagaatttttcaaatacttcaatcggtcttttaaaaaaaaaaagtacaactaaacaggatatttcgaaagttaatgtgaaacataaagataaggcaacaataaaaggaaaagataacattcctgtattatctaaaaaaaataatataaatgataagaaaaaagatataaacatattaaaccattctacaaatataaaggtgaatgagaaagaacgttcaaatttaaatagttcaattataaacatagaacatgatcataaaaatgttgatatcaatggaaaagtagaattggtaagtgacgaaaaaaaagaaaaaatagaaaaaaaagataaaaaaatggaagtggataatattaataagggtgataatttatataatgataacaatattaataaagatgacaatttacataatgttggaaatattaataaagatgacaatttacataatgttggcaatattaataaagatgataatttacataatgttggaaatattaataaagatgataatttacataatgttgacaatattaatcatgttcatgcttcaattagtaataaatttaaaagagaagataatatggatccattaaaaaaagataataatgaaaattttgtatcaaataaattaaatacagaaaaagaagatataacgtataaaataaatgatttagaaaaaaaaaatatattagataataaatgtaacatgaaagatgatgaatataattttgacacattaaacaaaaataatatccatgtggtagacaataatattaaaaatgtaaatgatggaataaatatttttgataattattatgatgataacagtgataggtataatattcataatgtttataatagtgatactaatagtactgataatgatgataataatgataggcatattacagataacgataattataaatatgattatgaggatcaaaaaaatgaaaataagaataccaaggatatagatgaagaaaagaaatgtaatatatatgataatatattaaaacaattaaacattcagaaaaatgaaaatttagaaaatagtcatatcataatttttggaaataaggatgtaggaaaatcatgcttagttaaagcattacaagaaatatgtataaataatgatgaacaagaagattacccattttattgtaataagaatagagttttacctttagattatgcttgtttaaaggtaaaaaatatagatgaaaatagaaaggtgaaagacataaaaagtaatagccatatatggatcttacaacatccatcttatatcaattcattgattaaaaatataaaaaattttaaaaatgtagaaaatgttattattttaatatgtacagatttatacaaaccttataatattatgtctgatattaatagttggatagataccttgtatattttatttgaagcaatacattctaatacaagcttaaagacattgaaccaattaaaagaaaaaatggaaaattatatttatgattacaaaaataaaacaatagaaaagggggaaaaaagagatcatcataaaaatgaagaattaaaagatatacaagaaaaaataaataacaacaacaacaacaaaaacaataatgataataataataataataataatgataatgataatatacataatagtatcaataataataacactattaatatgaataacaataataatataaataatataaataataataacaatattaatagcattaacagggatataaataaaaatatctttactcctgacaaagaacgtttaataaaaataaatttaaccttcccaatattttttattatttgtaaatctgatggatatgaaattttgaacaatagaacgtatcaaggatatatggatgttatcatttcctatttacgtaatttagccataaactatcaggcggctataatatattgtaatacaatcaataaggatcatcctaaaaatatagaacttttgtataaatatataatgcatagattatataactttccttttaacgagaagccaattttaaatgattatgaaaaaatattcataccatcaggatatgataatttggaattaataaataaatcaatcaaaaatacatttgttgaaaatttccataaaccatatgattcaattattattaagcctataccaaataaaagcatcgtcgaacaaaatgaaaatgtagtagatgattattattttaatgatttcttagcaaatttatctaatgatataaacaaaattaaaaagaatgatgaaaatgtaacaacgtggggaaaaaataaaattgatgttattgttaacaaaagtaatatatatacagaggaaactaatgaaaacaatttaaataaagataaaatagatcaatcattacatagcttttttcaaaatctcttagcaaaaggaagatccaaatcacctagtgctcctaatattaacccaacatcattagaaaaaagaaatataaattcatga

SEQ ID NO: 408 - DNA, 840 bp, Plasmodium falciparum
atggaagcttatttaaataaaattgataaaattgaaccgagcgatcaaaaaataaaagaagaatataacaaattcaaatatgatattacaaaacaagctattgaatcgttaagagaaagaatacctaaacgaatcatatttttcaataatttagtaaatgtaaattcggaacctgggagtatattaaatgttaatgatttagatggtgtatcctataaatataaaataaataaaattgaggagaatgtaagaaaaaagcataagggtaataattctagtgatttcgatgaaagagagaaaaagaaagattctttagatggtcatgtaaaacatttttcgaataatgaagatagcaaattaattatagatgataaagttttatatacacattatgtaccatcacataaacaaatatatttagaattagagaaaataaaaacatatgcttctgaacttatagaaattataggaaatattaaattgtggatacaattaaatgtaccaagaatagaagatggaaataattttggtgttggtatacaagaagaagctatacaagaattagcaagggtcgaagaaagtgcattcaatttatatgatgctatagtgaaatattatatggaaagagcaaaaatatctacgaaagtattgaaatatcctaatgtttcagattatcaagaagctgttagggaattagatgaaaaagaatggatacatatcaaaattactattgtagatatgagaaataattatattatgttatatgaccttctttataaaaattgggaaaaggttgttaaaccaaagaatgaagacgcacatcatagaatgacattttaa

SEQ ID NO: 409 - DNA, 1470 bp, Plasmodium falciparum
atggaagttataacagaaaaaccaaaagtacaatttaacttttatgatgaacagaacaatagctataataatagtactgactatccagaattctctaaggatagtaatatagattatcagccttatgtttatacaaatagaaaatttcctttagataaaaatagtgaactaagaagaaaagaatctcctagtagaaaaccaggtttatgtgtcgatgaaatatgtacgtgtggatttcatagatgccctcgaattataaaatcgataccttttgaaggagaaagtaattatcgaagcgaatttggacccaaagctttgcctgaattgccccctcaaatttatatgaaaccaccaaaaccattgccttttgagggacagactaattacagaagcgaatttggtcccaaacctttgcctgaattaccacctcagatttatatgaaaccaccaaaatcattgccttttgagggagaaacaaattacagaagtgaatttgggcccaaacctttgccagaattaccgccaaggatagaaactaaattagtgaaaccattaccttttgaaggtgaaagtaattatagaagtgaattcggtccaaaacctttaccagaattaccacctcagatttatatgaaaccaccaaaatcattgccttttgagggtgagactaattacagaagtgaatttgggcccaaacctttgcctgaattaccacctcagatttatatgaaaccaccaaaatcattgccttttgagggagaaacaaattacagaagtgaatttgggcccaaacctttgccagaattaccgccaaggatagaaactaaattagtgaaaccattaccttttgaaggtgaaagtaattatagaagtgaattcggtccaaaacctttaccagaattaccacctcagatttatatgaaaccaccaaaatcattgccttttgagggtgagactaattacagaagtgaatttgggcccaaacctttgcctgaattaccacctcagatttatatgaaaccaccaaaacaattgccttttgaaggagaaagtaattatagaagcgattatggacctaaacctttaccagaattaccccctagaattgagatgaaactccccaaatcgttacccttcgaaggtgagagtaattatcgaagcgaattcgggcccaaaccgttgcctgaattaccaccgaaaatatatatgcagcccccaaaaccattaccctttgagggtgaaagtaattacaggagtgagtttggtcctaaaccattacctgaattaccaccaagacatgaaactaaattagttaaacagttgccatttgaaggagaaagtagttatagaacagaatatatacgaaaggttcttcctgtttgtccagtggaattattacctaaatatcctacacctacctatccatctcaacatgtattttgggatagagaaacaaaaaagtggtactaa

SEQ ID NO: 410 - DNA, 1176 bp, Plasmodium falciparum
gataataacagctactcatttgaaattgtgaatagatctacgtggttaaatatagcagagagaatattcaaaggaaacgctccatttaattttacaataattccatataattatgtaaataattctacagaagaaaataataataaagattcagttttattaataagtaagaatttaaaaaattcttccaatcctgttgatgaaaataatcatataattgacagtacaaaaaaaaacacatcgaataataataataataatagtaatattgttgggatatacgaatctcaagtacatgaagaaaagataaaagaagataatacacgtcaggataatataaataaaaaggaaaacgaaataataaataataatcatcaaataccagtatcaaatattttttcagaaaatattgataataataaaaattacattgaatcaaattataagagcacgtataataataatccagagttgattcattcaacagattttattggttcaaataataatcatacatttaattttctttcgagatataataatagtgtattgaacaatatgcaaggaaatacaaaagttccaggtaacgttcctgaattaaaagctagaattttttcagaagaagaaaatactgaagtagaatctgcagaaaataatcatacgaattcattaaaccccaatgaatcatgtgatcaaataataaaattaggtgatataataaatagtgtaaatgaaaaaatcatatctataaattcgacagtaaataatgtattatgtataaatttagattcagtaaatggaaatggttttgtatggactttattaggagtacataagaaaaaaccattgattgatccatctaatttccctacaaaaagagtaacacaatcatatgttagtcctgatatttcagtgaccaatccagtacctatacctaaaaatagtaatacgaacaaagatgattcaataaataataaacaagatggaagtcaaaataacaccacaacaaatcattttcctaagcccagagaacagctagtcggaggctcatccatgttaataagtaaaattaagccccacaaacctggaaaatattttattgtctattcatattatagaccatttgatccaacaagggatacaaacacaagaattgtagagttaaacgtgcaataa

SEQ ID NO: 411 - DNA, 498 bp, Plasmodium falciparum
ggagcttttgaggctgaagaagtaggtgttgaatttttactaaaagaattaaagagcgtctccacttcaaccttagccacaaaagtaggtgataagttatcgtccttaaaaagtttgatagcaaaattatacgaaatatcagcttatttgaatgatatattaaatgggaatattgaaatgaatataaaaatattatacaatttacaaaatgtgtttagtcttttaccggatattgaaaacgtcgatttagtacaggcatttatggttaagaataatgacttaatgttaaatatatatataggtagtataacacgatctgttattgctcttcacaatttaatcaataataaaattgagaataaattgaattcggaaaaaaaaaaatctttagaaaatgatatagaaaaggacaaaataaaagataaggaaaaagaaaaggaaaaggaaaaagataaggaaaaagaaaatgataaggcaaaaaaggacaagaaaaattaa

SEQ ID NO: 412 - DNA, 1884 bp, Plasmodium falciparum
attgagggacccgttattggtattgacttgggtaccacttatagttgcgttggtgtttttaaaaatggaagagttgaaatattgaacaatgaattaggtaatcgtattaccccatcatatgtttcttttgtagatggagaaaggaaagttggtgaggcagctaaattagaagccacgttacatcctactcaaacagtttttgatgtaaagagattaataggaagaaaatttgatgaccaagaagttgttaaagatcgttctttattaccatatgaaattgtaaataatcaaggcaaaccaaatattaaggtacaaataaaggataaagatactacatttgctcctgaacaaattagtgctatggttttagaaaaaatgaaagaaatagctcaatcatttttaggtaaaccagtaaaaaatgcagttgttactgtccctgcttattttaatgatgctcaaagacaagcaacaaaagatgctggtactatagctggattgaacattgttcgtattatcaatgaaccaactgctgctgctttagcatatggtttagataagaaagaagagaccagtattttagtatacgatttaggtggtggtacttttgatgtttctattcttgttattgacaatggtgtttttgaagtatatgctactgctggtaatactcatttaggaggtgaagattttgatcaaagagttatggactattttataaaaatgttcaagaaaaaaaacaatatcgatttaagaactgacaaaagagctattcagaaattaagaaaagaagttgaaatagcaaaaagaaacttatctgttgttcactcaacacaaatcgaaattgaagatatagttgaaggacataatttttctgaaaccttaacaagagccaaatttgaagaattaaatgatgatttatttagagaaaccttagagccagtaaaaaaagttttggatgatgctaaatatgaaaaaagtaaaattgatgaaattgttttagtaggaggttcaacacgtattccaaaaattcaacaaattatcaaagaattctttaatggtaaagaaccaaatagaggtataaatcctgatgaagctgttgcttatggtgctgctatccaagcaggtattattttaggtgaagaattacaagacgttgttttattagatgttactccattaactttaggtatagaaactgtgggtggtattatgacacaattaattaaaagaaatactgtcatcccaaccaaaaaatcacaaaccttttcaacatatcaagataaccaaccagctgtcttaattcaagtttttgaaggagaaagagcattaaccaaagataatcaccttttaggaaagtttgaattatctggtattccaccagcacaaagaggagtacccaaaattgaagttacctttaccgtagacaaaaatggtatcttacatgttgaagctgaagacaaaggtacaggtaaaagtagaggtataactattactaatgacaaaggtagattatcgaaagaacaaatcgaaaaaatgattaatgatgcagaaaaattcgcagatgaagataaaaacttaagagaaaaagttgaagccaaaaataaccttgataattatatacagagtatgaaagcaactgttgaagataaagataaattagctgataaaatcgaaaaagaagataaaaatactatcctttcagctgttaaagatgctgaagattggttaaataataactcgaatgctgattctgaagcattaaaacaaaaattaaaagatcttgaagctgtatgccaaccaatcattgttaaattatatggtcaaccaggaggaccttcaccacaacctagtggagacgaagatgtagatagtgacgaattataa

SEQ ID NO: 413 - DNA, 1191 bp, Plasmodium falciparum
atgaattattgtaaaaccacgttccatatatttttttttgtcttgttctttataaccatttatgaaataaaatgtcaactacgctttgcgtctttgggtgattggggtaaggatacaaaaggtcagatattgaatgcaaagtattttaaacaatttataaagaatgaaagagttacatttatcgttagtcctggatctaatttcattgatggagttaaaggcttaaatgatccagcatggaaaaatttatatgaagatgtttattcagaagagaaaggagatatgtacatgccattttttacagtattaggtacaagagattggacaggaaattataatgctcagttattaaaaggtcaaggaatatatatagaaaaaaatggagaaacatctattgaaaaagatgcagatgctactaattatccaaaatggattatgccaaattattggtatcattattttacacattttacagtatcaagtggaccatctatagtaaaaactggccataaagatttagctgctgcatttatttttatcgatacatgggttttatcatctaacttcccatataaaaaaatacatgaaaaagcttggaatgatttaaaatcccaattatcagttgctaaaaaaattgctgattttataatagttgttggagatcaacctatttattcatctggttattctagaggtagttcttatttagcttattatttattacctttattaaaagatgcagaagtagacttatatatttcaggacatgataataatatggaagtcattgaagataatgatatggctcatattacatgtggatctggttctatgtctcaaggtaaatcaggaatgaaaaattccaaatcactcttctttagtagtgatattggtttttgcgtacatgaattatcaaataatggtatcgttaccaaattcgtcagtagtaaaaaaggagaagttatatatacacacaaacttaatatcaagaaaaaaaaaacactagataaagttaatgccttacaacactttgctgccttacccaatgtcgaattaacagatgtcccatcaagtggacccatgggaaataaagatacctttgttagagttgtaggaaccattggtattcttataggctccgtaattgtttttattggtgcttcctcttttttatcaaaaaatatgaaataa

SEQ ID NO: 414 - DNA, 1620 bp, Plasmodium falciparum
atgagtatgtgttgtcaacaattaaccatgtcttttccaactgttgatgatgcaaaatatgtgtatgatcaactagccgttattgcaccacttttccttgctcttactgcatgtactccctatttaggtgggtttctaactgaaacagatacaagatggagagtaatatctaacagtgttgattgtagaacggaagaagaattatcatatatatgtaaaccaagatattcaggaatatccttatatatatccaatgagttacctttaaaaagaaattactatttttataacgatgtagatgtaatacttgacaaaaatgtgtatgacaaattgaaaaaggaaaacgtggatgaatatttagctagacatatagcatctttatttgtaagagatccaattgttgtttttgaaggttcctatagtgaacgtgacattgctacaattcagaagaaaataatggaattgtcaaacgatgaagataaaattaaaggtatggtagaagggtcatcatcaaatagtttgtcatcaaaagttttgttagacaatgaggataggaataaaaatgatagtagtataaaagaaatgaataaatctaatgataataaccataataataattgccatattgaatataataataaaaaagatataaatatgaataagatatatttaagtgataattttgaatttatagaagattatgaagaaaaggttttatcatctcatcaacattttgaaaattttcaaagtactaattggaatagtgtacgttttaagccacctccaattcttgataatcattttaaaggacctagttcaattggatggagagttgaatttagaactcctgatattcaaattaccgattttgagaattcttgtgttgttacattagttatgttattatctaaatttatattaaaagaaagattaaatttatatattcctatgacattgttagaagaaaatttatttagagcatccaaaagagaagctttaacaaaagaaaaattttatttccgtaaagatctaagttatgataccttgaataatgaatttgaggaaaaaagtatatatgatatattttttaatgaaaccaatggattgtttttcttatgttacaaatatgtggacgaactatttaaagaaggattattaaatcaatcagccaaaaataaaatagatgaatatattgaattcgttaaacaaagatgtagtggaaaaatatgtacaggtgctatgtatttaagaaattttatattaaatcatccagcttatgaaaaaaattcttatatcaatagtaaaattaattatgatatatgtaaattaatagctgatattggaaagggattaatcataccacaagaattattaggtgtttttgtcgatccatataaagaaaggataaaaagtgatataaggcaaattaatgaaagccaatacctgaagtccttggcatataaatatatttcaggagaggattatacgcaatacttgctacttaatgaagtacttaaggatgaccaggattattgtacatgtaccagacgtacaatttatgaggaatctatggataatacagtggagtttgcaaaaaaaatgtacgaactgagtgcataa

SEQ ID NO: 415 - DNA, 1053 bp, Plasmodium falciparum
ctgaatcttattgaaaacattcgacaggggacattcgactacaaggatctcagagaagtttattttatgaacgacaatgatttgttcagcatgttaaatgataagaaagcctcagaagaaaaagggaaaggtaaagaagacgcacataataataataatattgataataagatatgtaataatgataaggtaggtgataaaaataaaaagttaagtaataataataataataatggaaatgatttaaatatacagattgaaggggatcagaattataattttaataaaaataatgagactaatatatttgttcttgataatgatgtagataaagtatgtattattcgcttcccattttctgtttcaaaagatatcaaaaaatatttattaaacaaaaatttagatatggttattcaacctactactttattaaattcaagattttttcttattcattttaaaaatataaataaaaaatttcatggaattctattagaattatctacacatatcgagatacataaaacattagatagaaataatttatataaatctaatgatgtttctcaaatgatttatgtatatgaacataatacaaatagtaaagaactcttgaaaaaatttataaataataatttcgaactatgcggaggaattagtaaaaaactcaatcatttcatttttcaaaatcatacaaaattattcaaatatcatgatatatattttgctgaaaaacttatatatgaatatttaaatacaccatattatgattattttgatttatatgtaaaaacattaaatgaaatgcataatcatataattatggaaaaagaaaataataataaacaaaatgaaattgttgacgaaacaacggatcttgcagctatcctgggatccttagataattcttataatattatgaatttaattgaaaaacaagatggagatatagatttcgaagcattattaaattatgatatagaaaaggaaaattacgaatcggacgtctccgacttattactgggcggcacatattatttacaaaagaagtaa

SEQ ID NO: 416 - DNA, 2610 bp, Plasmodium falciparum
atgaagatcatattctttttatgttcatttcttttttttattataaatacacaatgtgtaacacatgaaagttatcaagaacttgtcaaaaaactagaagctttagaagatgcagtattgacaggttatagtttatttcaaaaggaaaaaatggtattaaatgaagaagaaattactacaaaaggtgcaagtgctcaaagtggtgcaagtgctcaaagtggtgcaagtgctcaaagtggtgcaagtgctcaaagtggtgcaagtgctcaaagtggtgcaagtgctcaaagtggtacaagtggtccaagtggtccaagtggtacaagtccatcatctcgttcaaacactttacctcgttcaaatacttcatctggtgcaagccctccagctgatgcaagcgattcagatgctaaatcttacgctgatttaaaacacagagtacgaaattacttgttcactattaaagaactcaaatatcccgaactctttgatttaaccaatcatatgttaactttgtgtgataatattcatggtttcaaatatttaattgatggatatgaagaaattaatgaattattatataaattaaacttttattttgatttattaagagcaaaattaaatgatgtatgtgctaatgattattgtcaaatacctttcaatcttaaaattcgtgcaaatgaattagacgtacttaaaaaacttgtgttcggatatagaaaaccattagacaatattaaagataatgtaggaaaaatggaagattacattaaaaaaaataaaacaaccatagcaaatataaatgaattaattgaaggaagtaagaaaacaattgatcaaaataagaatgcagataatgaagaagggaaaaaaaaattataccaagctcaatatgatctttctatttacaataaacaattagaagaagcacataatttaataagcgttttagaaaaacgtattgacactttaaaaaaaaatgaaaacataaagaaattacttgataagataaatgaaattaaaaatcccccaccggccaattctggaaatacaccaaatactctccttgataagaacaaaaaaatcgaggaacacgaagaaaaaataaaagaaattgccaaaactattaaatttaacattgatagtttatttactgatccacttgaattagaatattatttaagagaaaaaaataaaaaagttgatgtaacacctaaatcacaagatcctacgaaatctgttcaaataccaaaagttccttatccaaatggtattgtatatcctttaccactcactgatattcataattcattagctgcagataatgataaaaattcatatggtgatttaatgaatcctcatactaaagaaaaaattaatgaaaaaattattacagataataaggaaagaaaaatattcattaataacattaaaaaaaaaattgatttagaagaaaaaaacattaatcacacaaaagaacaaaataaaaaattacttgaagattatgaaaagtcaaaaaaggattatgaagaattacttgaaaaattttatgaaatgaaatttaataataattttaacaaagatgtcgtagataaaatattcagtgcaagatatacatataatgttgaaaaacaaagatataataataaattttcatcctctaataattctgtatataatgttcaaaaattaaaaaaggctctttcatatcttgaagattattctttaagaaaaggaatttctgaaaaagattttaatcattattatactttgaaaactggcctcgaagctgatataaaaaaattaacagaagaaataaagagtagtgaaaacaaaattctagaaaaaaattttaaaggactaacacattcagcaaatggttccttagaagtatctgatattgtaaaattacaagtacaaaaagttttattaattaaaaaaatagaagacttaagaaagatagaattatttttaaaaaatgcacaactaaaagatagtattcatgtaccaaatatttataaaccacaaaataaaccagaaccatattatttaattgtattaaaaaaagaagtagataaattaaaagaatttataccaaaagtaaaagacatgttaaagaaagaacaagctgtcttatcaagtattacacaacctttagttgcagcaagcgaaacaactgaagatgggggtcactccacacacacattatcccaatcaggagaaacagaagtaacagaagaaacagaagaaacagaagaaacagtaggacacacaacaacggtaacaataacattaccaccaacacaaccatcaccaccaaaagaagtaaaagttgttgaaaattcaatagaacataagagtaatgacaattcacaagccttgacaaaaacagtttatctaaagaaattagatgaatttttaactaaatcatatatatgtcataaatatattttagtatcaaactctagtatggaccaaaaattattagaggtatataatcttactccagaagaagaaaatgaattaaaatcatgtgatccattagatttattatttaatattcaaaataacatacctgctatgtattcattatatgatagtatgaacaat

SEQ ID NO: 417 - DNA, 2607 bp, Plasmodium falciparum
aatattcaaaataacatacctgctatgtattcattatatgatagtatgaacaatgatttacaacatctcttttttgaattatatcaaaaggaaatgatttattatttacataaactaaaagaggaaaatcacatcaaaaaattattagaggagcaaaaacaaataactggaacatcatctacatccagtcctggaaatacaaccgtaaatactgctcaatccgcaactcacagtaattcccaaaaccaacaatcaaatgcatcctctaccaatacccaaaatggtgtagctgtatcatctggtcctgctgtagttgaagaaagtcatgatcccttaacagtattgtctattagtaacgatttgaaaggtattgttagtctcttaaatcttggaaataaaactaaagtacctaatccattaaccatttctacaacagagatggaaaaattttatgagaatattttaaaaaataatgatacctattttaatgatgatatcaaacaattcgtaaaatctaattcaaaagtaattacaggtttgaccgaaacacaaaaaaatgcattaaatgatgaaattaaaaaattaaaagatactttacagttatcatttgatttatataataaatataaattaaaattagatagattatttaataagaaaaaagaacttggccaagacaaaatgcaaattaaaaaacttactttattaaaagaacaattagaatcaaaattgaattcacttaataacccacataatgtattacaaaacttttctgttttctttaacaaaaaaaaagaagctgaaatagcagaaactgaaaacacattagaaaacacaaaaatattattgaaacattataaaggacttgttaaatattataatggtgaatcatctccattaaaaactttaagtgaagtatcaattcaaacagaagataattatgccaatttagaaaaatttagagtattaagtaaaatagatggaaaactcaatgataatttacatttaggaaagaaaaaattatctttcttatcaagtggattacatcatttaattactgaattaaaagaagtaataaaaaataaaaattatacaggtaattctccaagtgaaaataataagaaagttaacgaagctttaaaatcttacgaaaattttctcccagaagcaaaagttacaacagttgtaactccacctcaaccagatgtaactccatctccattatctgtaagggtaagtggtagttcaggatccacaaaagaagaaacacaaataccaacttcaggctctttattaacagaattacaacaagtagtacaattacaaaattatgacgaagaagatgattccttagttgtattacccatttttggagaatccgaagataatgacgaatatttagatcaagtagtaactggagaagcaatatctgtcacaatggataatatcctctcaggatttgaaaatgaatatgatgttatatatttaaaacctttagctggagtatatagaagcttaaaaaaacaaattgaaaaaaacatttttacatttaatttaaatttgaacgatatcttaaattcacgtcttaagaaacgaaaatatttcttagatgtattagaatctgatttaatgcaatttaaacatatatcctcaaatgaatacattattgaagattcatttaaattattgaattcagaacaaaaaaacacacttttaaaaagttacaaatatataaaagaatcagtagaaaatgatattaaatttgcacaggaaggtataagttattatgaaaaggttttagcgaaatataaggatgatttagaatcaattaaaaaagttatcaaagaagaaaaggagaagttcccatcatcaccaccaacaacacctccgtcaccagcaaaaacagacgaacaaaagaaggaaagtaagttccttccatttttaacaaacattgagaccttatacaataacttagttaataaaattgacgattacttaattaacttaaaggcaaagattaacgattgtaatgttgaaaaagatgaagcacatgttaaaataactaaacttagtgatttaaaagcaattgatgacaaaatagatctttttaaaaacccttacgacttcgaagcaattaaaaaattgataaatgatgatacgaaaaaagatatgcttggcaaattacttagtacaggattagttcaaaattttcctaatacaataatatcaaaattaattgaaggaaaattccaagatatgttaaacatttcacaacaccaatgcgtaaaaaaacaatgtccagaaaattctggatgtttcagacatttagatgaaagagaagaatgtaaatgtttattaaattacaaacaagaaggtgataaatgtgttgaaaatccaaatcctacttgtaacgaaaataatggtggatgtgatgcagatgccacatgtaccgaagaagattcaggtagcagcagaaagaaaatcacatgtgaatgtactaaacctgattcttatccacttttcgatggtattttctgcagttcctctaacttcttaggaatatcattcttattaatactcatgttaatattatacagtttcatttaa

SEQ ID NO: 418 - DNA, 777 bp, Plasmodium falciparum
atgataatttggtttattcaaccaacgattttttacataatttttatcttagcacgaaatatacaatgtacctacaaaggagataatataaatgaaataaaaagcatattagacaatgatgagttatacaatagcttaagcaatttagaaaatctgttattgcagacattagaacaagatgaattaaagattccaataatgaaaggtgatcttgataagtatttaaatatgtcaaattttaaaatacttaatgaattaaatgctgatggagcagaaaagccatatataatacctacatccaattgtagtgctaatgatatagtaaaatatgaacatactttaaaaactcaaataactctagaatataaacccgaaatatctgatatgcttaaaaggaaaaatattgttgttagaacattaaaaataataaaatttatgcaaacaccaatgagtgcttataaaaatacaaataatataaaacaatctttattagaaatgaataaactttttacaaataaagaaaaaaaattaaacgaacatactattaatgcattaagactcagagacaggatattcaataccaataatttaactcatagatctattaaaaagggtatctctacatacatgccaatagacacgaaatctgatataattgattatgatgaccttttatttacgaatcatccaagtattgaacttatggaaaatctagataaattagccaattactatcatataggaatatttaatatgattggttcacattatatagct

SEQ ID NO: 419 - DNA, 1953 bp, Plasmodium falciparum
ttattaaattctataaaggagaatgccaactcgaaacttcctgctttattatggaataaaataatagggaagggaaatgataatgaagtaaattttgaagataagaaaatgatagaaggtaacaaatctggtaatggagaagagcacaataaacataaaagaagacaagtagacaatcaagaagatgattatgatgttgatgaatatggaaatccaaaatcgggtgctccatacaagagcgaagaagaacatgcagaacaacaaaattattatggagaacatcacggagattatgaagacaaaaacgaatatcatggaaaatccaatatagaaaataataaagattttccagaacagggacaaaaagacgaagaaaaagaaaaagaagcaaaaaaaaaagcggaagaatttgaaaaaagaaaacaactacatgaagaagaaaaaagaaaagctagagaaacacaacaagccttacataaaaaattacaagaacaattacaacgattaaaagaacaagaaaaaaagaaagtggaacaccaaaagttaatacataaaattaaaacacaaggtgatgtagatccagcagtgcaaaaagtacttaacaagtataatcaaaaagaaaaagatgaagaacaacagatacttaaaataagagacttacaagtacaattacgtcatatccaacaaagaattcaaagtctaaaatctactaataatggccaaccaaaaacaaaagatgaatatttacaattaaaagatctacaaaaagaatattatgataaagaacaagatgaacaaaatatgatagaacacttagaacacttacaaggagaaatgcaatacttatatgaagaattacaaattgtatatgatgaaaaccaagcaaaaacggcgcaagcaaaagatgaacaacatgaattgaaaccacaagctgaaaaagatgcatcaaaactaacaacaacatatgatcaaacaaaagaagtaaaaccacaagctgaaaaagatgcatcaaaactaacaacaacatatgatcaaacaaaagaagtaaaaccacaagctgaaaaagatgcatcaaaactaacaacaacatatgatcaaacaaaagaagtaaaaccacaagctgaaaaagacgcattagcaaaaacagaaaatcaaaatggagaattattgcctcaagctgaaaaagatgcatcaaaactaacaacaacatatgatcaaacaaaagaagtaaaaccacaagctgaaaaagacgcattagcaaaaacagaaaatcaaaatggagaattattgcctcaagctgaaaaagatgcatcaaaactaacaacaacatatgatcaaacaaaggaagtaaaaccacaagctgaaaaagacgcattagcaaaaacagaaaatcaaaatggagaattattgcctcaagctgaaaaagatgcatcaaaactaacaacaacatatgatcaaacaaaggaagtaaaaccacaagctgaaaaagacgcattagcaaaaacagaaaatcaaagtggagaattacttactcaagctgaaaaagatgcattagcaaaaaaagaatctgaagctccaaaaggttcatcaacatcagataaaaacacaacggaaaaccaattaaatgcagaagcacaatcagaagtaaaaccacaatggcaaaaagactattggaaatcaaaaaatgagtcacaaacagaaacaaataatacatggaaaaaagattcatggaaaaaaaaaacagaagaacaacaaaatgcagaagctcaacaagaagtaaaatcaccatatgaaaaatattcatataataaagaaactaaaccacaaaatgataaatacacattaaacaaagaagtaaaaccacaaaatgaaaaatacacatacaatcaaaaagtaaaagctgaaaatactgaatcagaaaaatcattactagaaagttctgtatttaattaa

SEQ ID NO: 420 - DNA, 969 bp, Plasmodium falciparum
gtgtatagtaaaaacaaaccatccatcacatcacatcatacacaaaccaatagatcattatgtgaatgtgacacacaatcgacaaattataataatgatgaggaaatcaaatcagtgaaggaaaatttcgatcgacaagcgtcgcaacgttttgaagaatacgaagaacgtatgaaagaaaaacgccaaaaatgtaaagaacaacgtgacaaaagtatacaagaaattattgaaaaagataaaagggaaaaatcattagcacaaaaagtagaaaaaggttgtcttatatgtgggtgtgggctaggaagtgttgcaggaagtgttggaatatttggtacagttgcagtaaaagagttgacaaaagctgctattgctaaggcagttgtagtcgctaaggaagcaggtatggctgccgctaaagctgagggtgctgcggcaggtaaggaatttgttattgcaaaattacaagaaatgggtatatcaactgtaggtgttcagggattgcaatcctattttgttacaacggattatactaatgccttaacgatttttcgtgctataaataatcaatacagcccatcgtcatgtatatttgtttcctctggcactcgtcaggctttttgcacttgggtgaccgaacaatctaaatctgtagcgaatattcgagagatgcttcaaggtaattccgtttcatataccaaagttacagaaaaagctgtaggaactatcgtcacagatgccaaaaaagctgctggagaagctacagaaaaggctattgaagaagttatacaaagaagcactgctgcagcagaatctacatatgctggttgccagagtgctattattgcttctgttgttgcaataataattatagctttagttatgataattatatatttagttttacgttatcgtagaaaaaagaaaatgaagaaaaaagccgaatacacaaaattattaaatcaataa

SEQ ID NO: 421 - DNA, 567 bp, Plasmodium falciparum
tttatttctgataagcctttgaatattcatgtttctatatatataagtacaatatatgtggatataatattaaatatgttaattacaattttcagtttttataaagtatatttgatatcagtaaataaaattactttttttgaagataatatagtgaatcgttattttttttattgtttaacatcagtaaatatatttttctgtttcatttcgacagtattaaatattttttgtatatattacacagaacgatttaagacatttttaagattatcttcaaaggatgatgaaaaaaataaaatatcttttcgtttgaatagcttgagatatccccaaggaaatagtatgaatgaatatacaaatgaaaagaaaaaaaaaaaaaagaaaaaaggagaaaatgtaatggacggaaattttgaaatgaatagtgcagatgagaagaataattatatgagtaatgaaaccaaatataatagtaggaattttatatatgattttgatcatagaaatcaggacaataatgaaaaggttaattatttaaataatggagataaaaatatagtatga

SEQ ID NO: 422 - DNA, 1875 bp, Plasmodium falciparum
atggcaaaacaaagattaacagcactcgacatacgtgccattgttacattatgtaaaaagaatatcgtcggatgtattgtaacaaatatttacaatatttctaataagatatatgtgataaaatgttcaaggaaagaacaaaaactttttttcctggttgaagcagaaaagagaatacatataacggaatggaaaagagaaaaggatgtgatgccttcatcatttactatgaaattaagaaaacatttacgttcacgtaaaatttcgaatattaaacaattaggagctgatcgagttattgatatacaatttggatatgatgaaaaggcaagtcatttaattgtagaattatatattgcaggaaatataatattaactgatgagaattataagatcctgagtattttaaagagtaatgatactgttatgggcaaaaaatataatgtgaatgatatatataatgtggaagaacacatgtctgttttattatataagaatttgaaaggaccagatgataaggaatatttaaaaaaatgtataatggaaatattgttatattataataatattaatatggatacattaattttgaaagatggtgatgaaatatctaataatataaataacgtttctaatgttcacccgaatggtatattaaataatggagatattgaagaatataataaattgtgtttgaaaaatagtggtactgtaccaaagaagaatggtaataataatgataataaaatgttaggcacaaaggggaaagagaaatgtaaaaatgaaaataataaaaataatgaaagtaataaaaataatgaaagtaataaaaataatgaaagtaataaaagtaataaaaataataaaagtaataaaaataataaaagtaataaaaataataaaagtaaaaacaataatgataaggttgaaaatgctaattgcagtgataatgaaaaaatgaagaaggtaaaaaaattaaaaacattatgtgatttagcttctaaattaatattattcgcgcataacgatttaataatacattcctttttggagtgtgaggtaaatcctttagatttattagaaaactatgatataaatagattatgtgaaatattttgtcatgtaatagaggagtgcttatcaatattaaataagttaagtgatgaaacgtgtacgataaagggatatggtttttataatatagaaaatgacactaataaaaagattaataataataataataataataatatgtgtaatatgaataaaaaggatcaagataatgataaaaaagaagaatataatttcacggagttctctccaattattcttaagaatcatgaaatgaaattaaatgagggcaaaataaaatatatatcatttgatgattataatttatgtgtggatacatatttcagtaaattggaattatcaaaatatgataagcagcaagaaataactaagagtaaaaatgcaataacaaaggtagataagataaaattagatcatgaaaggagaattgaacaattagaaaaagaagtattattattaaaaaagaaaataactttaatacaattaaatgatgtattaatcgaagaaggaattaaattaatgcgttcagcactttctacaagtgcaaattgggaaaaaatatgggagcatataaaaatatttaagaagcaagaacatccaatagcagtgcgtataaaatcggtgaattttaagaattgtgaaatggattatttattaagtgactgtgatgataggaaaggtaataaaatgggtgatgatggtgatgataacgatgatgatgatgatggtgatgatgataacaataataacaataaatcatgtgtgaaacctaaaacgtttgct

SEQ ID NO: 423 - DNA, 2037 bp, Plasmodium falciparum
gcagaagaaaaaattaggaagacaaaaatggctaccgattttgctgttaaaaaagttgaaaagaaaaagaaaaacaaagataataataaacaaaaaggaaaagccaaatcaagtgttggtcaaattcaaaagttaagaaaagtgtattggtttgaaaaatttcattggtttatatcttctgaaaattatttagtgattgctggaagagatgctttacaaaatgaaatattatttagaagatattttcagaagaatgatatttatgtacatgcagatatacacggtgcagcatcttgtattattaaaaacccttataaggatacacctattcctgacaagactctttctgaagctggtcagttggctatttgtcgaagttctgcttggaacaacaaaataattacctctgcctggtgggtatattacaatcaggtgagtaagtcggctcctagtggtgaatatttaaaaacgggttcttttgtaataagagggaagaagaattatttgcctcatgtaaaattggaaatgggcttttgtgttctttttcaaattgaaaagaatgaagacttgaatgtggaaaaccttcctttggaggagaatactatagatattgatgatataaaaagggaggatgacaaaggtgatgacatggcacataataatatgataaatgggttagataataatgtatgtgataatattcctgctaataatgataagaaccatgtggataataagaataatgttcataattatgtgaattatttaaacaacatttcagttcattatacaaatgaagagcatggtattggaattactgaagagaaaataaaagaaaatgattctgtaaaatatttggtaccaaacaaatttaataacatttatatcttggaaaaaaataatatgttgaatgtttctgttataaaaggaacgaacgagaatgaaaagaataaaagcagagatatgtatataaaaatattgtataatatattaagtgatgatatatttaagacagattttttccataaatctgttttggcttggtataatataaaatcaaagagttatatattaaaaagaaagaaaaatggaaatgcatttaataaatatatatactacttaacaagaaataagaaagatatatataatatgatttgtattttatatcctttagtaatatataatatattaagaaaaatgaataatcctacttatatttataaaagtaaatatgttagtaatatatatgttaacaaattttatcatacgttttgtaaaataataaaatattttttccacatttataatatattaattagaaaaggtgatagatgtttcaaaagggaaagttttttttttgaaatatataaatataagaattatataataaatgtattttttaaaggattaaggggtaaaagaatattggttgatagtatatataattttcttatttttctggatagcacattgtatgaaagatgcaaatcgtcgcaggttgtaagtaatatattttctttgtcatgttataataaagatgtagaaaaggataattgtggaaatgtatataaaaatatgtatatggagaagagtatagattttgtaaataagaagatgttaaattatataataaattataaggagaattctaatatcgagaattacgattatgatattaatttttctaaggaaaaggctttgtttgttgcatgcgaggtttatggtaggcccgtaacgtttaaagaggacagtgatgaagaaatagtttgttcggagaaaaagaatggaaatacaacaaatgaggaagatgttaattctttatgtagtagtaattatagtgaaattagtgatactaataaaggaaataagaaactgaaaaagaagaatgtaacatttttatgtgatgatgatgaggataagagggatgtgtcgagggtttcgagaccaagggaacttacgggttttataaaaacggatgttaataaattattgaaagagatcgagagtgacgagaactcgaatattgggaatataaat

SEQ ID NO: 424 - DNA, 717 bp, Plasmodium falciparum
gctgataacatatcagaggaaaaagattatcacatatccaactatttaattaatccaaataaaaacaaaaatgatttatcagaagatgatcatacacaacatactgattttcaaagcgatgataacagtaaagaaggttcttataatttttcggaaagtgataaagaggaatatagaaataataaaaaaaaagaaaaacatggaataaaacgaaaaagacatgattatagtccctacattttttcaataaaagatgctcttctttataaatgtaaacaaataaatgaacaaaattatttaccattagaattaattggagtctatataaaatattgtaggaaatatattttccccaaattatctgaagatgccaaaaaatatatccgtaaattttatttacatcttcgtaatttagctaatactcacaatgatataagtgtacccataacaattagacaactcgaatcattaattagattatgtcaagcaagagcacgagcagatttatcacacatggtaactctaaaacatgcaaaagaagtagtagaaatatatcagaaaacaatattttatcctttacacttaaaaacattgaactttaaagaaaaacctactacaaaaaaaaataaaggaaaatccctcgcagcattatcgcacgtatttaagcaaaaaataatagagcaagccaaactaaaacacaaccaaatatataacaaa

SEQ ID NO: 425 - DNA, 2394 bp, Plasmodium falciparum
atgagttctcaaaataataataaacagggtggacaagatattaataataaaaaagacagtgatgacataaaaccttctgtaagcaaagaagatttaataaattcattaaaaaatgatgaattaaataaaaatacaacgatggatcaaaacgacatgaaaaaaaatgaaaatatgaatattaagaaaaatgaagttttaaataattccaataatgtagaagacggagataatgaaaattcgaaatttatgaataaaagtaaagaaggattgaataatataaatggagaaaagaatgatgacaataattctattgtaaaagtagaagaatcacctaaatctataggatataattattatgcatctgaaagtattgaaaatttatgtaaagaatttggtttagaaagtataaatactggtttaaattctgaacaagtaaaaataaatagagacaaatatggagaaaactttattgaaaaagatgaagtggtacctgtatggttaatatttttatcacaatattgtagtcctgttgttttgttattgttagttgctgctgtagctagtcttgcattaaatgaagttgttgaaggagtcgctattataagtatagttaccttgaatgcttgcttagcaacctatatggaaaaatcatcaggtgatgctataggcaaattagctgaaatggcttcaccacaatgtactgtgttaagaaatggtcagaaggtagttataccgtctcgagaagttgttgttggtgatgttgttcttattaatactggtgattctatttcagctgatttgagattatttgatgttattgaacttaaaacgaatgaaagtttattaacaggagaatcagaagatattaaaaaaaccattgtagcagataatttgtctacaccttttgcaacgaatttatgttttgctaccacatctgtaactagcggttctggtaaaggtattgttatatccacaggtttagatacacaagtaggaaaaattgcatcccaattaaaaaaaagcagtaaaggaagtaaattaacacctcttcaagtagcattaaataaattaggtggtttaattggtttaatagctattattgtattagttgttattatcagcttagctgttattattaaatatagagatccagcacatgcagataaagatccaacctttgttattattattattggtgtaggttttgctgtatcttccattccagaaggtttacctatggttgttactatcaccttatcagcaggagctaaagatatggttaaaaaaaatgcaaatgtaagaaaactaccagctgttgaaactttaggatgctgttcagtcatatgttctgataaaaccggtacattaactgaaggaaaaatgacagcaattaatgcagttaccatttgtaaaaattcttccttaagtgatgaaaataacaaattaacgaaaacatttgatttttatccaacaaaaggttttgaaccatgtggtggtttatttgattctaatgaattaactagcgaaaaaaagaaagagattgtgatagcaaagaatcaaaacacatcatatgataaagttttgtataattatggtaatccttcaaacaaatctgttattgtagacaaaacgaggtcattaatgtttgctgcttatttaaattcatatgatactacattatcaagagatcccaaaactttaaaatggggaatacatggtaatatgagtgaaggaccaattgttgttgctgctgctaaagtaggatatagttttattaataatccaaatcacaaatcttatttggataattttcaaagattagatgatttagaagttacatttaattcatcaagaaaaatgaaaatcactttttataaattaaaaacagtaaatgttttcgagaatgtatatttagataaacctggtaaagtatatacacatgttgctttgatcaaaggtgcacctgatagattacttgatagaagtacccatttattagaagaaacatctatgaaaaaagtacaagtttcatggaatagtacaataacacaagaagaaagaaatgtattaataaaaaagaatttggaattatcacaaaaagctttaagagttttatccatatgtattaagccactaacggatcaaaatattgaagaattgaaaaaattagaagatgcagatgaaagattaaaatatgttaattatgatgaaaatggtggttttatacctatgggttatgttgcatcatttgatcccccaagacctggagtaaaagaagctatacaaacatgtagagaagcacaagttaaagttattatgattacaggggatcaaaaacctactgcggttgctattggaaaattaataggtttgatagaagagaaatctgaacaa

SEQ ID NO: 426 - DNA, 645 bp, Plasmodium falciparum
ttcaatacaaatttaggtgtattatttctcttttatatgacatttctttttttctactttattcttataagttccaattgttcagaaaatatgatccaaatgaatgacataacatcgacatggataaatgaaaatatacataatagaaatgatcctataattacaaaaggaaatttggagaataaagaaaagtgtacttcatgtaatacatctataaaagaaaaattttattataaattaatgatagaaaaattcaaattattaaatacatgctctgtattaaatgaagaagaaataatgggaatacaaatttataaattaattagagatatttcttatttttatataaatgaaacagatttttatattttatcatgtgtacttttaatatattctttttttataacgggacataaatttattttaaataacttaccactagtttcaggttatgttggattgtataaatatgtgtggccaataagtcagttttatatttttaatcatattttttttccattcttcttttcgttattttttatcatttatatttataacataagaaggataaaaattataaattcttttaagcaatttgatttgtattatttttatgtttatccactaatgaacttttccttcaag

SEQ ID NO: 427 - DNA, 666 bp, Plasmodium falciparum
atgaagtatcccaacttttttattttaaaagttttttatttccttttcttttatttgagctttgaagatatttattaccattgtattaacataggaaaacctcaggttaacacaaatggaaaaaatgtcaactccaatgaaaaggctaataatttatctactgaatggagtaatagaggatttaattttatggatttattaaaaaatggatatttacagagtcatgggaatttagaagaagtgaaagatgaattagctaatgaattggctaataaaatacagaataaaattggtgaatatttgaaagatgaaaaaaatttgagtgttcttcaacatctccaacttgaagatttagacgatttaaaacattatgttaaggatgtgtcagaatatataggagcaaaagcaggtgatttattagatgaaaatttagaaagcactctcaagcctcttttagaaaggaaatcctttgagacatttgaacaagctttacataataaaagtacagataattttgtacctttcgaagaaaataacaaatccggaaatgctaatgaagaaacggaaaattttgtggatgaattagttgaggattatgaaaagacaaaaaatccagatttagatgaacagacaaaggatataaaaacacacagtgatagtgattaa

SEQ ID NO: 428 - DNA, 2364 bp, Plasmodium falciparum
atgaatatgtttgaaaataaaagaagcgaagatgaatctgttaaacttgatgatttaaaacatatttttgaaaatagttttgaacttcatttattaatagattataagaaaaaattagaagatttattggaaagtacagaaaaggtggattcatttttgaatgataagaatgttttgaatactatgaaaataaggaaaagaacattatcttttttgatggaaaacaaaaagtatatagataattttatacaaatgaatgaagaaaaagattacgcaaaaattaatgagtgtgaaaagaagaaagaagaagatattattcataatacaacatgtagaaaagtagaaaaactagaagataggattattcaaaatagccataataatcaattagcaaatcctgaatattgtagtacattaaaaggagaagaggataaatccgtaagtttgatagataataaatcaatgtgtgaaagggtagataatcatagtatttgtaatgaagtaaattcaagcatatcaagtacgtacgaaaaaacattgtacaataaatctaataatataattagaaatttaaaggaaatgaaaaagtatgaaagagaatgccaaaataataacagttatagtaatatgtattgtagctatatgatgaaattaagtaagaaaatattaggatttcctttaataaaagacttttctaaaggcttaagtacacttgaaccatctttacctttaaatgatcatttaaaaaaattatcggtttgttcaaattgttatagtaaacatcatgatttagcaaaagcaattatttgtagagtgacaaaaatgcattttgaagctaattataatgattacttaactgacgaagatttatttaaaacatccagtgaatttatccaatcagtcataagagaattagctaatactgtaaaagagtacaggaaaaaggaattgaatagggtatatttgcaacatgcaacagaaaatgatagtatgatactagatagagttaataaggatatgagcttggaattaaattataataatgttacaccaactagaactagtattcacaattgtagttgtacaaaaacgaataaggaatataatgaatccttttataaaattgtgagtccttcatttaataatgacactgttgaaaagagtaatattatcatacaagaaaataaccatattcgaaataatgaaattttacaattaggtgaagaagaagtgggaaattacgaatgtcagaataaagaagttattggttctgatacaaaagagcatacaaatgaaaggataaacgatcaaacaagtgaggaaaaatgtcatgatgatttctattcaaaggatatgcatatattatataaaaatacctttttaccaagagaagaaatagataactgtagtatagaaaaaattaatgatgttgaagagaaaaaaatgacacaccaacatgaagaaaatgacatattaaaggatgtaataaatgatacattaaatgatatgtcaaatgatgttccaaatgatatgtcaaatgatgttccaaatggtatgtcaaatgatgttccaaatggtatgtcaaatgatgttccaaatgatatatcaaatgatgttccaaatgatatatcaaatgatgtgtcaaatgatgttccaaatgatgtgtcaaatgatatatcaaatgatgtgtcaaataatgttccaaatgatgtgtcaaatgatgtgccaaatgatgtgccaaatgatgtgccaaatgatgtgccaaatgatgttcctaatgatacatcgatcactaatttgtatgaacaaaaaaatgatttgaacagctatgagaaatcttgtaaattaaataattttattccccttataggagtagaattaggaaagacgaaattccaaagagaatttacaaatggtacttttgttggtagagttacagaacaaataaaggacgaaaataataataatttttttgttgtaacttatgaagatggagatgttgaatggataactccatcctttttatttcaagaaattctaaaacaatctacaaataatactacatatcctttagctagtacttttaaagatatattttatgaagattttaaaaaggatataaaactaaacaaccattcttatgaattaaaaattgaaaagaaaaagcgaaaaagtatgtttgaatatgttcctaataataatgtaaccaaaagacaaaggcatgcattcgaagaaaatgtattaaaaaaaaaaaatacccatcaggaagttaatacatcacaaagaagtttgagtaaattgaaaaatgtagtatttaatgattcacttaaaaaaacaagaaaaagaactatgtctacaagttga

SEQ ID NO: 429 - DNA, 2466 bp, Plasmodium falciparum
atgaaattaaataacatatattctttttttttccttttttttgtgttatgtgtaatacaagaaaatgtaagaagggtcttatgtgatagtagtgttgagggtgataagggacctagtgatgatgtgtcagattctagtggggagaagaaggaagtaaaaagagatagggatacattagaagaaattgaagaaggagagaaaccaactgaatcgatggaaagccatcaatatcaaactgaagtaacaagattaatggatattatagttaattctttatatactcagaaagaagtatttttaagagaattaatatctaatgcagctgatgcattggagaagattagatttttatctttatctgatgaaagtgtattaggagaggaaaagaaattagaaatacgtatttcagcaaataaagaaaagaatattttatcaattacagatacaggtataggtatgacaaaagttgatttaataaataatttaggtactattgcaaaatctggtacttctaactttttagaagctatttctaaaagtggaggagatatgagtttaattggtcaatttggtgtaggtttttattctgcatttttagtagcagataaagtaatcgtatatacaaaaaataatgatgatgaacaatatatatgggaatcaacagcagatgctaaatttactatatataaagatccaagaggagctacattaaaaagaggtacacgtatatcattacatctaaaagaagatgcaacgaatttattaaatgataaaaaattaatggatttaatttctaaatatagtcaatttatacaattccctatatatttattacatgaaaatgtatatactgaagaggtattagcagatattgctaaagatatggtaaatgatccaaattatgatagtgtaaaagttgaagaaactgatgaccctaataaaaaaacaagaacagttgaaaagaaagtcaaaaaatggacacttatgaatgagcaaagacccatatggctaagatcaccaaaagaattaaaagatgaagattataaacaattttttagtgttttatcaggatataatgatcaacctttatatcatatacatttttttgcagaaggagaaattgaatttaagtgtttaatttatattccatctaaagcaccttctatgaatgatcaattgtattctaaacaaaattctctcaaattatatgttagaagagttttagttgcagatgaatttgttgaattcttacctagatatatgagttttgtgaaaggtgttgttgacagtgatgatttacctcttaatgtatccagagaacagttacaacagaataaaatattgaaggcagtttctaaacgtattgtacgtaaaattttagataccttccataaattatacaaagaaggtaagaaaaataaagaaaccctacgatctgaattagaaaatgaaactgatgaagagaaaaaaaaagaaattaccaaaaaattaagtgaaccaagcacatataaattaatatataaggaatatagaaaatttttaaagagtggttgttatgaagatgatattaatcgtaataaaattgcaaaattacttttattcaaaactatgcaatatccaaaaagtatatctttagatacatatattgaacatatgaaacctgatcaaaaatttatttattatgcttcaggagattcatatgaatatttagccaaaataccacaattacaaatctttaaaaaaaaaaatattgatgtacttttcttaacagaatctgttgatgaatcatgtatacaaagagtacaagaatacgaaggaaagaaatttaaatctattcaaaaaggagaaatctcttttgaattaacagaagaagaaaagaaaaaagaacaacaaatgcaaaaaatgtataaagcattaattgatgttatatcagatactctaaaaaatcaaatattcaaggtagaaatttctagaagattagtagatgcaccatgtgctgttgtatcaactgaatggggattatcaggacaaatggaaaaattaatgaaaatgaatgttagtaattctgatcaaattaaagcaatgagtggacaaaaaatacttgaaattaatccaaatcatccaattatgatcgatcttttaaaaagatctgtaactaaccctaaagatcttgaactaacgaatagtattaaaattatgtaccaatcagctaaattagcatcaggatttgatttagaagatactgcagatttggctcaaatagtttatgaccatattaatcaaaaattaggagttgataataatttaaaaattgacgatttagatccatctatatttgaaactaaaaaaattgaagatgaaaatgactcatccaaatttgaagaagaaattaatatagatgatgaaatacaaaagaaagataataatgtagataatgaatcaaatgataaaagtgacgaattataa

SEQ ID NO: 430 - DNA, 2472 bp, Plasmodium falciparum
gcaaataaatttaaaaatttaaatatggataatatgaatgcacctaatggagtaacaaacctcaatgtgggcataaacaatgaagtagtaaaagaagagaaaactaatacttgcctaaatataaatgagcaaatacattcccatacaaaattgaaatgtatcaaaaatgggaagcctagaaatattaatcagaaggaaaataatgtagtatatattgaatctgataattctcataatgacaataataataataataataacaacaataataataataacaacaacaacaacaacaacaataataataataataataacagttttgagaataatatgctgttgctatgtaagtccaaaaatgttaagaatcaaaatagaatgaacaatctatttcgtaaagaggaaaataaagataccaaattaaaatctcttaattacaatattttaataaatccttgttataataaaaataatgttattaatgaattatttatgaatacaaaagaaaaaagcttatatggtaacaccaacaagtttcataacacattgaataataatatgaatatgaacaattataataaccaaaatataaataatatttatccattgacgcataatatttccattgttaaccatatattgaatcattcctattacaatgaaaatacagaacaaaataataaaaacctttttcataatacaatattagtacctaaaaattgtaataatataatgaacaactctgataaatataattatttgaatgcatataaccaaaattataccttatacaataatacacttaataacaacaattctttagtacaaccatcagatgttaataatatgaattgttcatatgaatcgattaatggtaacatgccaataaatgatcaatcgtgtgatacatacaatgatgaatataatgatacatataatgatacatataatgatacatataatgatacatataatgatacacataatgatacacataatgatacacataatgatacatataatgatgaatataatgatacatataatgaaataaataatgaaacatacaatgatacattaaatgatacccctaatgatacactatatgatacattaaatggaattactaatgatacaccatatattacacctacaaatgcatgtaacctttcttatgaagaattaatgtacaaaatgcaaaataacaataatatatattgtaaaaagcatgatagtaattatattatatctaatgggataaataatcatatttgtgctcataaggaagtaaattataatgtattaaatcatgtcacaaatatcaatacttatgtaaatagtaaaaatatattttcaaatgttgctgttacaaacgatactgatttacatgcttgtaataatgaacaaagaaataatatatccaatcataatattaataaaaatgtcgttaatttaaacaacgttcattcaataaataaggaattaaataattatccaataaattcaacacaagattataatacgaattatgacaaaaacggttgtttgggaacattaacatgtgatataaaaaataaaaataataaaaataataaaaataacaaaaataataaaaataataaaaataataaaaataataaaaataaaaataataatgataataataataataataataacaacaataataatagtaataataataaggatattattatattaaataaaaacaatataaataacgctaacatttttaatataaattcattaaaagaaaaactattgaatgatgatatatctaaaaacaaagaaaagaaaaaaaagaaatgtgtcataagaaagattaaaaaaaggaacaaggttaacccaaaacggaataataatattaataatagaaataaaaataatggtagttataaatgtgataccaaaagagttaataaaattaacaatggtttcatgaaaaattttaaaaacaaatatacaagttcttgcattaattataatatgtgtgctattagtgatttatcaactaatataaaaaataaggaaaattttgttattggaaattatccatatactaatggtgtatcctatataacaaacggagaaaataatacaactaataatggtaaaaagaatgatgaccatagaaataaaaagaaagaatataatagtaacgaaaataataattactgcaacaataattctaatagaaataataataataataataataatagtcattttggtggtaataagaacaacagaggtgatgataatgatgaggatgatcaagaaaaaaataacaaaagaaatatttatggtaaaaatggagacgacgaagaagaagattatgatggggaggatgataataatgaagaaaatgatcataataataaaaagaatataaaaagaaaaaacaagaaatctaataaggcatataataataatgatgatgaaaacaaatgt

SEQ ID NO: 431 - DNA, 2229 bp, Plasmodium falciparum
atgagaagaaatttactgaagttaacctctataaattgtaagaagaatgactatgtttccctttctaacaatttttttttaataaaaaataggtcatataaatatataaccgtaagaaacaaaataggaagaaatgtatttaatgagaaggataattgtgccatattgaatcgaggacaaacacatgtcgtaggtatcaagaaaaatatatgtaccgaaaataaagttaaacaacaggatggagagttttatatgaatcaaagagttccagatgatatggataatgatatggataataatgtggataatgatatggataacaatgtggataatcatgtggataatcatgtggataatcatgtggataatcatgtggataatcatatggataatcatataaataatcatacacataaaaatgtgcatgatgacacatcatatgataataattctttcgatagataccaaagaaaaagagacgaaataggtgaaaacggttttgttcaaaatagaagatatgaaaattatgaaaaacgtaaacaatcaaaaacaaattattcatatgataatgattataatcagggttcaagaaataaaagaaatatgtcatatcctgatagatatgaagaattaggaagtcatttaaaggacatcgaatgggataatgtgaaatataaaatggaaaggcaaaatctatacaacaacaattataataagtgtaatgatcagaataataatcagaatagtaatgataatttaaataatgagcaaacaaattgtttaagtaaagaggatatacaaaacgaattaaagaaaaataatatttatattaacaaggatggaataatacataatatcattaataaattctcagatgtatgttttcatgaatccatattaaattatctaaataataaatttagtgaacctacagctattcaaaaaatcacatggcctattgctttatcaggaaaagatcttataggtgtagcagaaacgggaagtggaaaaacgttagcttttgttttgccgtgttttatgcatatacttaagcataaagaaattatacaaaataataataataataaacaaacaaatcaaaacaataatttacagcaagaacaggaagggaaaacaaataatcatcatataataaataattataatgaaaataatgacaacaatgaaaataatcacaacaacaacaacaataataataataataataataatagttatgattatgattatgatataaattcctctgaacgggcaagtgatacttatggactcattttattacccacgagagaattgtgcttacaagttttagatgaaatcaaatccttcgaaaaaaacctaccaattaaaagtgttgctgtttatggtggagtaccgaaatattatcaaataaataatttaaaaaaaggtgctgatattattgttgctaccccaggaagacttttagactttttagaaaatggtaacatcaaccttttaaaatgtatttatgttgttattgatgaagctgatcgtttacttgatatgggattcgaaaaacaattaagaaaaattatgacccaagttaataaaaataaacaattgctattcttaactgctacatggcctgaacaagtcaggaaacttgcatatgatttttgttcctatgatccagtaaaaattcaaataggaaaaaatgaattgacagcaaataaaaatattgagcaaaatgttattataagttcttctattgatatgaagaaaaaattattagattggttaaaagaaaattatgaaaataataaaatattaatattttgtgataccaaaagaaattgtgataatttatgtaaagaattaagatatcatcagtataatgctttatcaattcatggggataagcagcaaagagaaagagatcgaatattgaataattacaaaacagatcgatgtaatatattagtagcaaccgatgtagcttcaagaggattagatattaaaaatatttctgttgtcattaattatgatatacctaatactatagaagattatatacatagaataggaagaacaggaagagctgggaaaaaagggaaatcaatcttgttcttttcgtatgattattatatgccacaaaaattaaagtttgcaaaagagttaattaaattgttaaataaaacaaatcaaactgttccaccacagttaaaagaaatagcttattcaagatga

SEQ ID NO: 432 - DNA, 2232 bp, Plasmodium falciparum
atgatgaacatgaaaattgttttattcagtttattgctctttgtcataagatggaatattattagttgtaataaaaacgacaagaaccaaggtgttgatatgaatgttttgaataattatgaaaatttatttaaatttgttaaatgtgaatattgtaatgaacatacttatgttaaaggtaagaaagctccttcagatcctcaatgtgctgatataaaagaagaatgcaaagaattacttaaggaaaaacaatacacagattcagttacatatttaatggatggttttaaatcagcaaataattcagcaaataatggtaaaaaaaataacgctgaagaaatgaaaaatttagtaaatttcttacaatctcataagaaattaattaaagcattaaaaaagaatattgaaagtatacaaaataagaaacacttaatttataaaaacaaatcatataatccattattactttcttgtgttaaaaaaatgaatatgttaaaagaaaatgttgactatattcaaaaaaatcaaaacttatttaaagaattaatgaatcaaaaagctacctactcttttgttaataccaaaaaaaaaattatttctttaaaatcacaaggtcataaaaaagaaacctcacaaaatcaaaatgaaaataacgacaatcaaaaatatcaagaagttaatgatgaagatgatgtaaatgatgaagaagatacaaacgatgacgaagatactaacgatgaagaagatacaaacgatgacgaagatacaaatgatgacgaagatactaacgatgaagaagatactaacgacgaagaagatcatgaaaataataatgctacagcatacgaattaggtatcgtcccagttaacgatgtgttaaatgttaatatgaaaaatatgataacaggaaataattttatggatgttgttaaaaatacattagctcaatcaggtggattaggaagtaatgatttaataaatttcttaaatcaaggtaaagaaataggagaaaatttattaaacataacaaagatgaacttgggagataagaataatcttgaaagttttcctttagatgaattaaatatgttaaaagataatttaataaactatgaattcatattagataatttgaaaacaagtgttttaaataaattaaaagatttattattaagattattatacaaagcatatgtatcatataagaaaagaaaagctcaagaaaaaggattaccagaacctactgttactaatgaagaatatgttgaagaattaaagaaaggtattctagatatgggtatcaaattattatttagtaaagttaaaagcctattaaaaaaattaaaaaataaaatattccctaagaaaaaagaagataatcaagcagtagataccaaaagtatggaagaacccaaagttaaagcacaaccagctcttagaggtgttgaaccaacggaagattctaatattatgaacagtattaataatgttatggatgaaattgatttctttgaaaaagaattaatcgaaaataataatacacctaatgttgtaccaccaactcaatcaaaaaaaaaaaacaaaaatgaaactgtatctggtatggatgaaaattttgataatcatcctgaaaattattttaaagaagaatattattatgatgaaaatgatgatatggaagtaaaagttaaaaaaataggtgtcacattaaaaaaatttgaaccacttaaaaatggaaatgttagtgaaaccattaaattgattcatttaggaaataaagataaaaaacacattgaagctataaacaacgatattcaaattattaaacaagaattacaagctatttataatgaacttatgaattatacaaatggaaacaaaaatattcaacaaatatttcaacaaaatattctagaaaatgatgttcttaatcaagaaacggaggaagaaatggaaaaacaagttgaagcaatcaccaagcaaatagaagctgaagtggatgccctcgcaccaaaaaataaggaagaagaagaaaaagaaaaggaaaaagaagaaaaagaaaaagaagaaaaagaaaaagaaaaagaagaaaaagaaaaagaagaaaaagaaaaagaagaaaaagaaaaagaagaaaaagaagaagaaaaaaaagaaaaagaagaagaacaagaagaagaagaagaagaagaaatagtaccagaaaatttgacaactgaagaatcaaaataa

SEQ ID NO: 433 - DNA, 2148 bp, Plasmodium falciparum
atgatgagacggagaagcgtttacaatttcgatcaaggaaaacatggctatttaatgaatcatatatcttggcttaattttgtgagtttcaattggattacacaacttttaagatgtcttaagaatgatgattttgtattaccttgtatagaagaaacaagttccatagaacattatagcacgaacctaaataggaatgttcgaaatattcaattaagaaaatataataaatataataaatataagaattattgttgtagtaaatataatgatggtaataaaagttgtagttgctctacaaagaatcatacaaataaatttcataaaagaaaaaaggaagatcattttttaaaaagtagtggtattacatatgcagttttgaaaacatttaaatattatttaagtttaattagtttctttcatattatacataccatatttctaatatttgttgctgtgtgtattgagaaatatgtcttgttaatcaaaggcggttcaaatgttgtaactctaccatttggattcaaaaattctaaagtgttgttcggatttatagtcatttcagtaatattcattagtcagttttttgatgccctcctttgctattatgattttagattaagagtaaatatggaggtcaccgttatgtattttttatacaaaataacgttaggcaatttcaacaatcagttgattaatagaaacgatatatatgatgaccatagtgaagagggaaagggccaacataaaaatcaatgtcaatatgatgaaaatgatcagaatgatcagaatgagcaaagcgatttacgtgatatacgacatatgcatgataaacatgtcaaacataatgatgaagaaagcaaagattcaaccaacagtacgacatatatcaaaaataataacaatcaaatgagccacataaacgatttgtcaattacaaataatatgtccgatgtacatattttatcgagcataaaaaaccaagatcagaataacagtaataatgtttcgagcatggatagcaacaccaattacatgagcaaaacgacatgtttaacgtgtacaggctccgaatttaataaagaagaaaaagatgagaaaaaagaacttttagaagaagcgaaaaagaaagataaagaagtattcgatattagtatatataatataatgtttatagatacaccatttttaatttattttataacagcattaatagaattagcaaatatgataataaaatttataatgtcattttatatgttttattataaaatgggtagtgcagctgtattaaacggtgctttgttaattataataatgtatggattaatgtttgcttttgaattttcatccagtttatttaaattgaaatatttaaaatatcgtgatacaagaataagtaatatgcatcatatattaaaagaattcaaattaatgaaaatatttaattgggaatctatagcttttgattatgtaaatatgtttcgaataaaagaaatgaaaatatgtaaaatcagaacctatttaagttctttaagtaattatgttaataatatatctgtaaatattgtagaagttgctattttctttttttacataagaagtgaattaaagagtaataaaaccgtcagcttcagttctttaatcacacccctttttgtttataaatctttaatttctggtgtatctaattttccaaatataattaataatttaatagaaggtgctataaatattaagcgtattaataaatatataaactattatttgtttaacaatgatatgaatgattattttaagaattcattgaacggtatgaaaagtaatacgtgtaactttcaaaatggtaacaccaacaatgtgaatggttatgtggatgattatgtggatgattatgtggatgattatgtggatgattatgtgaatgattatgtgaatgattatgtggatgattatatggatcatatgatggagtataatataaatatcaatagtaaaaatggttgttcctccaaatcaagaaagaacaacaaatcattttcaaaagatcatttttcaaatcatgaacaagggacgatgcaaagtttttacaaatttttggatacacacaaaaataaaacaaaacaaaaaagcgattgtaaaaaaaaa

SEQ ID NO: 434 - DNA, 1023 bp, Plasmodium falciparum
atgagaatgaaaagaattcatattttgttgcttgtaatatttttgttatgtttgcggtatggatatagtattaagaagaagcgcagtcctaataacaagaataggctttttataaataagagattgaaatatataaatagtaagataataagtagaagaaaagaaaattatgtaaagatgaaaatgacagagaataaagtgaagggtaaagacataatatatggaaatgagtgtcgaaatgaattattaaaaggaatattaacagtatcagatgttgtgaaattaacattaggtccaagagggagaaatgtattattagaaaaagaatatggaagtccattaataataaatgatggagtaacaatagcaaaaaatatatctttaaaagatcgaaagaaaaataatggtgtaaaattaatgcaagaaagtacaaatatatcaaatgataaagcaggtgatggtacaagttcaacagcattaatgacagcaacaattaccaaaaaaggtattgaacaagttaatagaaatcacaaccctattcctatacaaagaggtatacaattagcctcaaaaatgattattgaaaaaattaaatctttatctacacctataaaaacatataaagatatacttaatatagcaaccatagcaagtaataatgatgtacatatgggacaaattattgctaatgcttatgataaattaggaaaaaatgcagccatcatattagatgataatgctgatattaatgacaaattagaatttactgaaggttataattttgatagaggaattattaatccatatcttttatataatgaaaataaggattatattgaatattctaatgtatccactttaataacagatcaaaatattgataatattcaatccattttaccaattcttgaaatattcgctaaaaataaacaaccattgtgtattatagctgatgattttagtaatgaagtcttgcagaccttgatcataaacaagttaaagggcgcaataaaagtggtacat

SEQ ID NO: 435 - DNA, 2733 bp, Plasmodium falciparum
catcctttatatatagatttatatatgagagatatatttgagtttttaaatttatttgatttaaaattattaaaaaatattctttttataaatatacaaatcttaacatttatatatgaaattaaatatggttattgggtaagaaatggtccacaaatgattttccaggttggtgaatatgataattctttattttttcaaaatgatttaataggaatacaatttgctataataatgatgaatgtcttacctttatacgaaaatcaaaaagtttatttagattcacatgtgatcaatctatttcatcaaatatggaatattaaggttcaatacgatgaaccacttaaaaaattaccatggtcaaaaaatgaatacaacgatgtgcaaaatgattatatacataaagctgatgatgaaatatgtataaatgaaaaggtatatgatgaggatactaataaatatatagatacatccccaaatttttcatataatcataatattcagaatcactatatggtagaagaacattctgaggataaaaaaccgtattatatgaataaaataaaatatataaaaaaaaatgatgaattttttgaagaacatatgaaaatgtatgagagcatgcttatatataatagatccaaaaaatcaaatgataataataccttacctgttaataataaaatgggaaattcaaaaggaaaaaatttggatcacgatgatggtgatcatgtcaaattgctttttggaattgacgacaaaaatgtaagcaataataataacacaaataatataaatagtataaatagtataaataatataaataatataaatgtgtgtaataataacaatacatatgtttataataaggtggaatttaaatctatatgtgatcttttgtgtaaatattcatgcaaacaattaaaagaccaagaaaatgaatcaaacccactgttaagagaaaccgaagggaggttaacctcggataatataaatttcaacaaattagataataataatgataatatacaaagtgatttgttagataatgataaaaggtattataataaaggatctgtaaggaaagaatcaatatataatgaagatagaatatgtgaaaaatataaaaagagcaaactagaatggaatgaatatttagaagaatttatgaatatagaaataagaaatccatttattatattatatcaattaatatttaagaattttcgtatgaatttaaatataagaaaaataaatgatatgtatgtagaaatcgaaatacatcatataaagatggcatataaaatatttagtgatatatatacaaataaatctactgtagattctaggaaaattggtcatatattttattttcaatttttttatgatataattatacgtatctttaatgaattatattatttagaatatagtaatataccaagaaaaacatcttatgaaaaatatatagaaagaggtaaatatcatgttaagaaaatattaatacaattattagcatcaaaagattttcaatattttcaactcgaaaatgtatttcctaagcaatttagacaccatccaagtttttatgaacttgttaataaatatggatataaaacacatatgcctagaagtaatgttaatttgataaagttaaataagaattcgtggtatctctatgatgccttttggcccctttcagcattcaaagattttcaaacagctaatgaaaaatgtataaaagaagaaaattcttcctatataggatgttcaagggaagaagacaaagaatatttaaatttttcatttcgcaaagtacaaaatttattattctatacatttaaaaatagttgtctcgtttctatacttttaattgtgtttattattaatgacgaatttcagaggaaaatcgaaaaaaaaaaaaaagaagaattagaaaaggaagaaatgaaaaagcatatgaaagcggatgtaacgggagaagacgactcgttgcttaatcaaaaaggtggtacaacgaataataatacgtgtgatgtaggagttgtcattaatgaggaagcaaaccgatccagtggaatgtcacaaaatgttgtgacttatgagagtggtataaatatgaataatgatgatgtattaggagaagaaaggaataataacgatgatattaattatatggatgataatgatgatgataatgatgataatgatgatgataatgatgataatgatgatgataatgatgatgataataatgatgataataatgataatgacaataatgatgatgacaataatgatgatgacaataatgatgatgacaataatgatgatgacaataatgatgatgacaataatgatgatgacaataatgatgatgacaataatgatgatgacaataatgatgatgacaataatgatgatgacaatgatgataatgatgaagattccaatcttcatggtagttcttctaatatgctaaatattataaacagcggtgataataattcagtaactaattctagtaatataaatacagcacgaaataataatagtacatatataattgtagatcagaatggagataatgaaaccttatttgcagagatattaataaatcgtaatcctaataattctataaatatggaaattgtaaatgtaacggataataatgttggtgatgaaaataataatagaaattatcgtcatttaaatgctgatggattatctgaa

SEQ ID NO: 436 - DNA, 1767 bp, Plasmodium falciparum
gatttttttagtgaagatcaaacgactgaccataataaacaaaacaatgaatatagtcatagtaatcatatagaaaatactttgaatgagttatatcacaaatcgcataaagaagatgaaaagaatcatgctcttcatgaaggaacatattcacagaataatttatttattggacataatgatcttcctcccttgagtaatatatataaattattaaaagatgaaataccaaataagcaatggttatattttttaaaaagttataaaaaacggattagtaaaaatatcatagtatgtacatgtgctatcgaaccaaaggaatataaaaaagaaaaagatttaaaaaatattttaaaacaaatatgtttagaagataatagtatcttgatatttactgataaaaataataaattagttattggttctataggaatattaaatatcgaagttattatagataaaataaagaatgattataatatagatatcaaaacgagtccagttgaaattattcagaaggaatatattcaaggatattatgaaaatagtataaaaaaggaaatgaaagttggttcatatatttcgactataatacttggatttgttataaaagaaaaagatgaatttatagatatttctagttatgtacaaaatgtattaaaacatgaaaaaatttcccactttttatcatcagaagaaggaataaaaaataatatatccaataataaatataataataataataaatataataataataataaatataataataataataaattaaatatttcagataacctggataaagataacaatttgttattatatgatgatatacgttttgaagataataaaaaaatgtatatatccaccacaaatgatgataggcaaaattatgatgaacaccataatattaacatattggataatatggaaataaaagaaagtacagaaaaggatagaaaaaaaaattatgtatataataatttaaagttaggtaattcaaaatctatgtatgataccaagggtgttaaaaattgggttcataagtataatgatgatcatgacaagatatacttggaggataatataaaggatcatcctcataagcaaagtattgatgatgaacctgaactactttgtgataatgatgataatgatgataatgataatgatgatgataatgatgatgttgatgaatatctcttaaactttaattatgataccctatttgaaaacagtgttactgtccataaagatgtattattatacattgacgagttaaaaaaaatgaataaaaaaaaaaaaaatgtctatgataatattttaaatagttgtattatatctttaaaaaactgtttaagtaatggatatcatactaatggaaatattattaataccgaaataataataaaaaacttaaaaatatttgatagttcaactactgctgtagctaaatatgcatgtaatcatttatattatgaaatgataaaaaaagcaaatatacaaatagttaatcctttatcattaattttaatacaaacagacgaagcatatactgggatcattgtaaaggatttaatacaatacagaaatgggactattatacaaataatgaaaaataaagaatcggattttaaacttatgaaaatatatgcaataattccagtgaaatttacacataattactcttccattttacgatctatatctagtggacatgctaactttcttatgactttttgtggttataaaaagtgttaa

SEQ ID NO: 437 - DNA, 2643 bp, Plasmodium falciparum
atgagttcgaagtatgacaatcagagttttctgtcaacaggatcagataaatatggtgaacaagaaaattctgttttattgcatgatgaggaagatgaatatataaatgagaataaaaagaagagaaatgaacgtgataagaaatttcgatattatgaaaatttttttaatagaaggagaagtaaaaagtggaattatttcataatattttttttaggtgtatgtttaggttttgccatatggccattttttatgactataataacgtatagattattttataaagataattttaataatacaaattatcgaacaaataattcttccacttctttgaaatcttatggaaatgagaaaaataagaagagtgataacaatggaaaagtacccatgaaagatcaatctccaaataaagtatctccacattttaaacctatacgatttgaagaaatagcaggaatagatgaatctaaattagaattattagaagtagttgattttataaaaaatagagaaaagtatcatgaaatgggtgctagaatgccaaagggtgttttattagttggacctccgggttcaggaaaaaccatgttagctagagctgtagcaactgaagctaatgttccatatatttatacttctggaccagaatttatagaaatatatgtaggtcaaggggctaaaagaatacggcagttatttgctcatgcaagatcagttgctccatccattgtatttattgatgaaattgatgcaattggtggaaagagaagttcaggatctgttaacggtgcaggtcaaagagaacatgatcaaacattaaatcaattgttagttgaaatggatggatttagtaatactgtacatattatggttataggtgcgacaaacagaattgataccttagacagtgctttattacgaccaggtagatttgataggatcgtttatgtaccattacccgatattaatggaagaaagaaaattttagaaatatatattaaaaaaattaagagtgatttaaaattagaagatattgaaaagatagcaagattaacacctgggttttctggtgcagatttagaaaatgttgtaaatgaggctactattttagctacaagaaataataaaagtttagttacaattaatgaattatatgaagccagagataaagtttctatgggcccagaaagaaaatcattaagacaatcagaccatcaaagaaggataacagcttatcatgaagctggtcatgctatcgttgcatattttcttcaacctaaaacagatccaatacataaggctacaattatttcaagaggtaatgctcttggatatgttgaacaaattccagttgatgatagacataattattttaagagtcaaatggaagcaaaattagctgtttgtatgggaggtagaacagctgaagaaattgtttttggtaaatcagaaactagtagtggtgcttcaagtgatatatctagagctaccgaaattgcttataaaatggtaacggaatggggtatgtctgataaattaggaccattaaattataaaaaaagaatgggagatggttattcgtccaatcgattatctgctcaaactgtttcatctatagaagtcgaagtaaagtccttagtagaaaaaggaaaaagcttatcagaagaaatattaagaagacatagaaaagaattagataatttagcttttgcattattagataaagaaaccttatccggagaagagatcaaaaatattattgatccaaataattccaaaaattattcaggtaaggtagaaatgttaaaaaatgatacaaagaaaaatgagaaaaagagtaacagtgtatctaaaaataaaagcaccatttctgaggattatgacaaaaatcaaaataatgtggaacaaaattaccaatcacatgatcataccttagttaaaaatgaagaaaatttgaataatatgaaaaatgatattgatgacaataatacgagagatggtcaagtaaattcagactcatttgtaaaaagaaaagaagtaacggatcaggatataaatggaaaagaattaagtgagatggataataaagagataaaagaaaataaaaagttagatggagaggaattaaataaaattattattgataacgataaaatgggtgatatgaaaaagaatataaaagaagttattaaaaaaatgaaaaaaaaacaatctaaaggttcttacaagacatataaaaatgtattgaaatctgtaagtgaacacaaggaattgaaaactcagaagaaagcggatgaaaataaaatcgtggctgataataatgagaagtcatctaataatagcttggataaaaataatacacaaggttcaatagatgaaaagggatataaaaataataataataataataataatatggtgaaaaatatcaatgaattgtttgaagagaattttcctgaatataagaaatatgataatgaaaataacgattttgtaaaaaccaaagaaaattactttgacaattttaatgaagtaatagatatatctcatataaaaaatgttgatgaaatgaaaaagtttaatatatttgaacataacttaaataaattatttttatttgacatatttaaaagcgactag

SEQ ID NO: 438 - DNA, 2931 bp, Plasmodium falciparum
actcttgaatatttagaagaagatattaaaattgtacaacatattataatgaaatatgtacaaaaattaaattctcttaaagatatcgaacaattaattgatgaattaaatgaaaacgaattaaaaacaaacgaatatttcacatttataaaagatatttttataagtattcatcagaattatatgaaagaagaattaaacagaaaagagcaaatgattataaatggacaaggattaattaaagaaaatgaagtaattcaattagaagaaaaattaaaagaattaacactagacaaaaatagatatgataaagatattaaaaatcagaaagatgaattacgtcatttaattgatagaaaggattcttatgaagacgaattaaatcatattataaacgaattagaaataaaaagagaagaaattaatcaaatgaataataaattgaatgaattaaaaaatattcaaaatgaaaataaacgtaaagttgaagatataaaaactaaagaaggagatttaaaatataaagaagaagaattaaaatatcgagaagagaatttaaaacataaagaagaagagttattaattaaaaatgaaaattatatgaataaagaaaaagaacttatgaaaagtaaagaagagttaattgttcgagaaaatgatttaataaaaaataaagaagatttaatagataaaacaaatgaattgatgttgaaaagagaagaattacagaaagataaaatacatattgatgaattaaaaaatgatttaatgttaaaatttgagaaattatataatgcacaaaatgatattaaagttaaagaaacgaaattgaaaaaaatttatgaaaaattaaaagatcataatataattgaattgtttgatataaataatagggataacaatagtaatataaaaaaccatacttcaaataatataaatagtgatataaaaaaccatactacaaataatataaataatattaacaatattaacaatattaacaatcggttatcattaaaaaggttgggaatacttttaggacttgatgaaataggagatgaaaatgaacttgattttcattttgataaagaaaatgaaagtttaaatttagattcccttgaatatacaacatattttaacgaattcaaaaagagaattaaaaatttaaaaaacaatttattaaacagagaaaaggatgttgaaatatacaaaaagtcttacgaaattgaaaagaaagaaaaagaaatttacaaaatcgaattagaaaaattaaatgaattattacacgtagaacaaatgaataggaaaaatctggatttagaattagagaaatataaaagtgaagatactcatattgtaaaatccttaagagaatctgaagaattattaaatgaaaaaaataataaaatattagaattacaacaaaaactaattgagacatcatatgaaataaatattatgatcgataaaaataaaaatttgataaaggaaaaagataaagattatgaacagaaaattgataatttgaattcaattattaatgattatgaaaaagaaataaaagaaatgaataaagaaaaattaaaacttaccagaaaatctattgaaaaaatgattgatgatggagaagatattaaaaaattgaaaatcgatttagatgaagcacaagaattaatattagatttaaaagaaaaaaatgaagaattaaataatataaatattgaattaataaattctaataaagatatgaggttagatattgatgtattactatcaaatgttgacaatttgaataaagaaaacatattaaatgaaaagaaaatgaatgaagatgaacaaaaatataatgaattaaaaattgcatatgatcaaaaagtacatgagtttaataaattatataatatgctttccataaaaatgaaaaacaaatttgattcagaaaatgatatggaacaaaattatacaaatgataatgttaatatgcaaaaatcaagaaatagtataaataataagtatgatattaatgattttgaaaatgatacgataattgccttaaacgaaaagaacatgataatcgaatctttgaatgaaaagattgcacattatgaagaagaaaattataaaaaagaagaactagttaataagtataaaaatatgataaacgaattatcaaacaagatacacatttttgaagacaatttagattttttaataagtttgaatgaatttataaaaacgaataattttacttatcaaaatatattagatatattaaataattcaattttatataaaaaactattaagtaaaatcttggttgaaaatcaattttataaatatattatatctatcagagattggttatttgaaattataaaatcaaaaagttatagtaatagtaataataataacaataacaatattattagtaataatagtaataccagagaatctgtattacgaatgagtttaaggaagaagggtaattttaaaagaacggcaagtgtaacatcgaatatttataatgatttgtttttaagcgaaaatgttttgtcagctgaaaaggagaatgatgaaataatgaatagttttaataaaaccttaaacgttattgacgatgattttaacagttttgaaaatatatgtattgaattaaataatttgtttatagaggaagattggaataatatatttataaaattaaacattttagaaaatcaatttaaaaatattataaatctaattatacatgaaatgaagaaaataaataagaaaataaaaaataataataatgaaaaattggaattaaagaagagtgtaaaaatattgaagaaaagattaaattcaatatctaatgatcttgaaaaacgtacagaagaaatagaacatttaaatattgccttaaacaaggaatgtgcagaaaaggatata

SEQ ID NO: 439 - DNA, 1716 bp, Plasmodium falciparum
aatattatacttttcttacttcataaatatatagattattatgataaacaaaaagatatttgtccattcattgtaaagactgatatacaagtaaaaaatgatattatggaagaaaacacacaaaacctcaaaacaaaaaataatgaacacatggaaaataaagaagacttaaataatatatctgatcatttacaaaatgtgaagaatttagatactagtacccattttgaaaaaagagaggacatggaacaacacgatgaaaaaatgtataataagaatgaagataaatcaaatggtatcttactatctgaccataacaataataataaggataataaaaaaagtaaaaagaatgacaaggttgatgaagaagaagatgatgatgaaaatattccatctgaattaaatgataaagacttagaaaaattaatagagaaaaatgtggaaattaaagatcttatgggtatatctagtccattaggaaataataatataaaaaagaaaaaagataataaaaaaaataatgataatgaaaataaagaaattaaacttgatttaaaaaaatcatgtttaacaaatgaggaaaagaaagaatattttattatttgtatttattcttttattatacaattatatgattatataaattgtacagataaagcattagaacttattgaaaaatgtataaaaagtattgaacaaaaaacaaataaaaatttaatatatgaattaatatttattaaaggattaatttataaacgtaatggtaattatttaggtgcatataaatattttgaacaatgtagaaatgttaatataggtgataggtatattaatacaaaaactatcaaaacatgtttaaaatgtggactaatcaaagatgcaaaaaaaatggcaagtatttttacaaatcctttagataataatttttttaaaaatataaatgaaacacaatgtttttggttagaatataatatatcattaagctatgttaataatcatccaaatatacatttaatacattatttaaaaacagaagcaaataatatatatgattttaaaaatgtatccccttgtgataatcaacataatgtgaaaaatataacaacgcaaaatggaaacattccacatcacaacgacaataataataataataataataatgatgatgatacaaataaaattgatgatatgcttaatgaaacaccgttcaatttaaaaaaaagtattttattagagaatgatattaattcaaaaaatatatttcaagattatagtaaaggattacatttattacatatgggacataaacaatttatagatatacatgaagatcaaatatgtttctattattatactatgagaaaaatgttatttaaaacatatagacatttattatatatgactggtcatcttttttcaagtcgattctatcgtagatttggaaaatctctaatcagaattttaatagatatgtatgattttaaaataaccggaaaagtagaaacaaataaaggaaataaaaagaaaaacaaaactaataataataataataataataataatgtattaaatcaggaagaaaatattttttatgaacatattcaaaatgaacctttagataatgctatgatatatatgaacacatttttatctcaaccaaatattgatatatcagtacacagattgaattatgaaatagaaaagaggaaaggt

SEQ ID NO: 440 - DNA, 2751 bp, Plasmodium falciparum
aaatttttatgtaaacatccttctgttaatttttatcctttggttatctctatatttaaaagaattttttcagaattacatacttctgatcatgtatatttaaaaaagaaatcatatgtacctaaccaattattattattattattattaaaaaattgtcaacagaaattacaaaaacgcacatccatctcttcacaatgtgaccatattaaaaatgatgccaatattgaaaatgaggaaaatattaaaaaggaaaatattaaaaaggataatattaaaaatgacaatgttaataataatgaccatattaaaaatgacaatgttaataataatgaccatattaaaaatgataatattaaaaatgacaatgttaataataatgaccatattaaaaatgataatattaaaaatgacagtgttaataataatgaccatattaaaaataataattattcttattattataatctgatggatacaaacattcatatatcaaacaacattaaccaaacaaatcatttatcaaatgtaattaaacaaaatgatctatatttttattataataactccaacattaatgatacacaaaatgtattaacacatcataaggatgaaaatgaagatacacttataaaatatattaatatatatcctaatgaatatatcaatccatatgatttaataaataacgaacaaggatatgatcaatatgaacaaaatgaacaaaatgaagaaaataaaaaaaatataatcgaacaacccatgttaggtggtcttaataaaaaatatcccgatataatgactggatatttttttgatttggattatattcaaaaattaatagaaatatatgcaggtactaatgcttcagtagatgtacaagaattaaatgaagatcaattaaatgctcagtgtggactcaaattaattaaagaagaaattatgatattacaagaaaattttaatttaaaaattaataatactgaatatgaatatatacaacaaattgaacaagaagaacaaaaattaaaaaatgcatgtattaaaaatgctatacatattttcttaaatccaaattatatttatttaatattttttattctctcaaaaattaaatatgaatatttatttgatagtaatacaaataatctaagaaatctatcggcgttggtagataaaatacatattgtcttgttacagtttgttgaattcttacaaagtaatattataccatctctctatttcaaatatatacctaatatattacacatctttcagttttttgatatctctcaatcattccatattgctagatacgccttccctttttttatgcaaacgaaacaaaacgaaaaacaagtgcacaacaaaaataaaaatgataataataaaaatgataataataaaaatgataataataaaaatgaaaataataaaaatgaaaataataaaaatgaaaataataaaaatgaaaataataaaaatgaaaataataaaaatgaaaataataataataataataaaaataataataataatgacacctctgtcgtgaagaaagatataacgtctacgattaaggcagttcatgcggatgcgtcccctgaggaagaaggaaatttaaacattttgaaagaaaccaaaccaaaaagtgataaccacgataatattaattgtgaaaatgttatcggcgaacgttcatgtaacacaacccatgatgaaatggttaagccacttaaaaaatacgacgatccaaattttcatcacgtaaacgaaattttgtggaaaatgttcctaatgcccatagtcgataaatatttaaaagaagaagaattgaacggtataaacatcaatttttatcttacatattggagattaagtatatcagatatttatgttccacataagcaatatcaaaaagtattagataaatatgaaaattatataaaaaaattagaaaaatattatgaagaaaataaaaaaaatgatgaatataaatggattcctaaacaaataaaaaaattaaatataaaaaaaaataatttaaaaaatgaatatgaatatcatataaatcatacaaaacaaattaaacaatatttagcacatattgttgatcattgggtagatccacaaaaggttagtttaaatacttttgtagcttttataaaatgtctaatagcacccagaattctaaatagtgaaaaagattcattattctgttccaaatttatacaaatattactagaactacatacgccattatttaatctatgtactttagtatatatatttactaaaatgttaatgccattaattaatgcatgtacagaaaaagaagcactaaacataggaatatttttcaatgatttcttttcatatatatacttattatgtgaagatattaaatattttcaaaatgtctcaaataaaaatccttgttttagttacactctcaattttcagtcaaaagatacaattactcataacaatattatacagaaagttatgaaatgggaaaaaactatcctctcattattatttgaaaataataattttgaaaaatcatggatcaattcaaaatcggttgttatcttcttatttagatttttaaatactttcccatattcacacaaaatcaaaaattctataaaaacatatcttgaaaacttacaaaattttgcaaataaccaaggttggaaagatattgtcatatcaattaatagtttgaagacaatgatggagaaaaacaga

SEQ ID NO: 441 - DNA, 2040 bp, Plasmodium falciparum
atggatttacatgtaaaaaagaataattatgatcaagttttaaatataaataaaaatcaaggaaattcgaattatgacctgatcgaaataaaaaataataccaacaataataataatagtaacaataataataataataacaaattaatagaacataaccattttaataatatagacgaacaaacaaaagaaaaacaaaatgtattttatgataatgatgtgagggaagtaaacacaaatgtaacctcaaatgtaaaagaaaataaaccatctaagaataatacggatactaatgtatatttatctattaatagatgtgtgaataatgagtgttcaaaaaaagaagattattacaaagatgtttataataatatatcacatatattagaccatggtttagctaacaaatcatgtgtaccaaaaggttgcttagaattagacaataaaaaagatgtttttaataaaatgataaacattaatagtaatatttgtaatacgaataataaagatatctataataaaataactaatgaacataattataaagatttaaatagtttaaatcatattaacgatgaagagaaaaaatcaaatataccaaatgaaaatatcttaagggaaaaatctgcacattgtgaagatgaaaaaaaaagtgaagcatggaattataaagaatccataaattataataaaaatcaatttgaaaaaaagaagaaaaaaagttttgaagaaaaaaaagaaagacaaaaagaattatttgttgcatattggttaaatggaattgttgatttattaaaacgtggatttaaaaatggtaatatatgtggaagtaattctgtagggaaaaaaattgctgaagtcttaaagaaaattgtagaaatatatcaatggaaaaatgtatttgatttaattgaaatcatcaaatatttaggaaaacaaattattaaaaataataaaatgttttttgtaataccaaatataataagacgagtattaaccataataagggttgagcattttaaacagttatatttatataataataattatatggataatatcaatatgtttgatgataaagtatgtgaagaaaatcgagggacacaaagccccaataattattgtcataataataataaaaacaattgtatcgataataatattttttatgataagaataaggtaaagaaaaaaaatacgatgcccataccaaaagaaggatcaaaaaatatagctaagtttgatataaacagtaatacattatatcaacgtgaaataaaaaactttcagaaatcattttcattttattttgaaaagccatgtaatgaaaatacttataaaataccagctacaaatacattaaaacattctataatagaaggcattgaagaactgatagcggaaatagatacatcttgggaagaagctgaacaaagaacatcatatgatttgtttacagaaaatgatgttatattaacacttgggtattcagcaggtgtggagaaatttttaaaaactataaataaaaagaaagatggaatatctgttatagtagtaggtggagatattaatagaaatggattcaggatgtctcaattattaagtgatgatggtgttgatacaacatatatatctgatgcagctgtttttgccgttatacctaaagtcacaaaagttgttctaggttctgttgctgtgtcttcatcaggtggaacaattacaaaaatgggtggttataatattgcatgctcagcacatttgtactccaaacctgtaattattgtattaccattattcaaattaatatatgttcctttatatgatccattaaaacaaaacgaattacaaccaggtccatcgcttatatataatgatgaggatgtagaaaatcttcatgtgaggataccaaaatatgattacataccagaacatctaataacattatatataacagaaatgggaccagtagattcttttcaattatacaacataacaaaaaagagatatcatccggatgatatggacttgagttttgactaa

SEQ ID NO: 442 - DNA, 1245 bp, Plasmodium falciparum
gccaaaagtgttgatgtagaaaaagaactcattttgaacagacataatttcaaactattacttaaaattttaaagattactaaaaagtccttattatatgaagagtcttatatgaagatatctgttgctaatttattaacaaaattttacaccttgattttagtaaatatagaacatataagtaaattaaatccaaaggaacatttctataatgatttagataatgaatttaaacatatatatcaagatcaaatgtttgaattatttatacaaaagatatcttcagatattgttagaaaaccatttatcaaaagaaatatcggaagaatagataaaggtagtatagaattaacattagcattaataaaagtaaaattattacattacaaaccaacattgaataatccatattccagtttatattttgatgagaatttaaaaaaacaattaaattatgcatttaaattaattattattggttctactagtataattgctagtcttgcaaactacggagaaagatatggtgttttaaaacaatgtccattagatattgttaagaatttaaatcaacaatgtgaatatgtttcttttgaaattaagaaattaatattcccaataaatatttttgtgaacttattaattccattatttttaccatatgatgatgtattagtagataaaaatataattgatgaagtcaaaaaattctttaacgttattatcgataccgatgattcttacttacaaaaatatatgaaaacaacaattaacactataagaaaatcaaaagatctagatataaataatgtaaattatgaagaagaaatggaaaaaattgtagttcaagaagcacataaagttattgaagaaattaacaaagaaagacgagcatctttcaaatttcaagattttgtagtcaaagaagattcagtagtattgtataataaaagtggaatccaatattcatttaaatttgatcatttaaatagaaaagaagattttatgcgtattataggtagttatcaatttaaaaatcccataggttatcaaacatcacaacttgtttttgaacctcaaaataatcatattggttctttaatggttggatcaaataaaaatacattcgatggaaaattaagtgtatgtcatatgtgttataaagaagatgatgattctttggttgttgatgcaatatttagtatcctctggtcttctggaattgatagatttagtgcctttata

SEQ ID NO: 443 - DNA, 2124 bp, Plasmodium falciparum
aatttcaataaaaaaaaaaatcaagatcataaagcacatggatcaaatgtattccttgatgggggtctttcattaagtaaaaatatgtcatttagtgatataaatgatttaagtgaatctattcaaaattatttatatttagaaaaatttttagctgatagtaatataccttctattccatatcaaggattttcggttagacgtgtaaatgatggtatgcatgtaacatataataatagatcaactacaccaccactttataaagataatgttttagatcaattcgaattagtaggaaaatcattaattagtgaatatttccaaaaagtcaaatgttcatttattcaatatccattcaatttatattattggctagtccttaatccaggaaaaccaaatataagcttaagtagtaaaaccggtctaattaaagaagatgatttaatacctaaaaccgttgaagaaaaattaaaggaagaagaagaacatgatattaaaattgttgaaaatatattatctgaagatatctttgattttaaagataaatcagatgatgatcaaagtacaaccgctgatgtactttctacagacacagatgattcagaaactgacgctgaaaaaacatcaaacaattcaaataccctacacaaaaaagaaacaccagcaatgaaatataatatgaatatagcacaagatgaaattaatagacaaaatgatgtatctaaaaatacaacatatgcagaaaataatgaatacacatctgaaaatataactaaaccatcagatcaaaatacagaaaactatggaacaaaaatgccctctccatcattcatacaaatagataaagttaaccaacaagatcaacaaaatgatgctcatatagaaagttctaaaaatactcaagaaaatcttaactatgatgataacactaatatgtatgaagaaaataaaaatgataagaaaaacaaaaaattaaataataatacaaaagaaataagtttccttgaaagaagagaaactaatcctataccatttagttcaaatatgattaatgaaaaaaataaagaagctcataaagaacactatggaaatttcaatagaccatataatatatatgtacctaaaaaagatatcttcagaaatttccatctagttgtaaaagtagtacatgcattaatatccttaaataaattctccatggttagtccagatacaatattaaaaaaaggtatagaatccatgaaaaaaaaacactcactcaaaatgattaaaaatataaatccatttatacataaaatgatacttgacatgaatgaaaccatacaaaaattaaaatccgatagtgaaaaagcatatggtggaccaaaagcagatattatatctttatataaaattgtggaattccaattatttaatcaatatattatatatccaccattaaaaagattaaccaaaaaagaacttaaatatatacttgatgttgttaaccaaggatattatttctacctaaaaaatgttatcacaaaattaaaaagagaaaatctacaaaaatcgaaagttgtcaaaatatttaataatttccaagaattctctaatttattagatgatgatggtgtagataaattatataatatatttactgaaacatttaaatgtaaaaatattaaatgttttgatcttttattccaaggattcttaaccgaacaatataataacattgtctatcgttatacacatgatcatgatgctatgaactcatataatgataacatatttaataataaagaattattaaacaaaatatttagaagagcatatgacaactattttattacacctgttaaaaacaatcaaccaaaaaaactcatatctttagaaaaaccatcattagaacaaccagtattgacgttagaagaatttgcatatggattccatgaatttggaaataaaattgaaaaatggagatcaatgcttaccctattcaatataagacatatatatattaatatatgccacatgctattaagtgttaaacatagtatacaacgatcacacagagtttttatgcacaaatttggtttcttcggtatcttcagaagaaagagggaaatttacataccataa

SEQ ID NO: 444 - DNA, 624 bp, Plasmodium falciparum
agaaaaaaaggcatattacaagagttattaaatactttaatagaagatataaaaacacgattgaagagtatattatatccaaacaatttagattcagaatataagaatataacatctaaaactaaaataacattagaggcagctgaaaagtgtttttcggaaaataagtggaaaataaaagattatgatatgggttctaccttagaaatgataagtgtaaaaaataatggatatgaaaaattatatatattagaaaaatctataaacaaattaaagaaattacttaatgatataaataataaatatcaaacaattaaaaaggctaaaataaaattagacggattagttgaaaataaatccgctgatagtactgaacagaaaaaaaatctaatgaatcttttacatattatagaaagtataaaagaaaatgataaaatacaaaatttagaacattattttatagatatcaataatataaatttagaaaccaatttgttaatagaaaatgtgcaaaattcattaaaccaattaatgaagttaaaggaagatgaaaagaaaaagaataccttaataaacgaaataaaatcaaagatggataatataaatgaaaagttaaaacatata

SEQ ID NO: 445 - DNA, 819 bp, Plasmodium falciparum
gagaattatctaaataaccattataatgtaagtcttattcaaaacaagaccaaaagagcaacgataaattcaagattattagcacaaacaaaaaatcataatccgcattatcataatgacccagaactcaaagaaataattgataaattgaacgaggaagcaataaaaaaataccagcaaactcatgatccatatgaacaattgaaagatgtagtagaaaaaaatggaacaaaatatacaggtggtaatgatgcagaacctaggtcaacgctggaaaaagaattattggaaacatatgaagaaatgtttggtgacgaatgtcatatgttgaagtcgggtaagtaccaaaatgttgatgaaaaatcttcaacatgtgaatgtactgatattaatggtgggaaattatcaaaaacaaaaggaagagataagtatttaaaaaaactaaaacacagatgtataggtgggatatgttcttgctcagtaggtagttttctcttaacaatgttcggtttgcatgctgctaaagctgctgcccttgctgagtttactaaatatggaacaacttatagtgcgtgcaaatcctctatcactatatatagtatgcttagtagtgattctatgattgcaggtagtacagcttgttttactgatttaacagtacctgctgcaacttctgctggtgcaatttttgatccttgtggtattacagctttagttctacttatattagctgttatacttataatattatatatatggttgtatagaagaagaaaaaattcatggaaacatgaatgcaagaaacatttatgtaagtaa

SEQ ID NO: 446 - DNA, 954 bp, Brucella melitensis
atgtataactatctcgattttgaaaaacccgtcgccgacctcgaaggccagattcttgagctgaaaaaactcgcgcaggaacagggcagcgtcgagatgggcgacgagattagccgcctcgagaaacgctcggccgatgcgctgaaggatatctaccgcaagctgacgccctggcagaaggcgcagatcgcccgccatccggaccgtccgcattgccttgaatatatcgaccggcttttcaccgaattcacgccgcttgccggcgaccgcaaattcgccaatgatgaagcccttcaggctggtttcggccgtttcaacggcacgcctgtcgccattatcgggcaggaaaagggttccgacaccaagacccgcctcaagcataatttcggctcggcccggccggaaggctatcgcaaggccgtccgcatcatggaaatggccgaccgcttccagcttccgcttatcaccttcgtggatacggcaggcgcctatccgggcgtcagcgccgaagagcgcggccaggcggaagccattgcccgctccaccgccgaatgcctcaagctgcgcgtgccggtgatctcgatcatcatcggcgaaggcggctccggcggcgccatcgctattgcggtggcaaaccgcgtctatatgctggaacattcgatctattcggtcatctcaccggaaggggcagcgtcgatcctgtggcatgattccacccgtgccaaggatgccgcctccaacatgcgcattaccgcgcaggatttgttcgatctcaagatcatcgacggcatcattcctgaaccgctcggtggtgcgcatcgcggcaaggaatccgtgatcgacgccacgggcgacatcattgccgcctcgctgcgctccatgaaggatatcgacggtgaaacgctgaaacaggaacgccgccagaagttcctggaaattggtcgcaacatctga

SEQ ID NO: 447 - DNA, 1047 bp, Brucella melitensis
gtggggcagggggttacttttagccttccgtcgaatgacgcggctgtatttgagacagggcaaacaaagaagctgtcagcaacaacaggaaatgacggaaccgcgaccgcaataattatccgaaatgccgcaggaggaggaacagttactgtaacctgtgtgctggatgccgatggtaaggtttcagatcaatgtgatgtgcattttgctgctgtctcggctgatattatttctttcagtgtttcagctactgacccgcttgggtattcaaataatggtaaggcagcgcgagtttttgctgaaataattcccagccccaataaccccgtaacaaactgtctcattaatttttctacatttggggttagtgggattataaataattatgtaaatataatcggtgagccaaacagtgtttcgtccggcccgtcacttatgcaattcgttcagattggaaacactaagacgactatcccagtcgatgtcagttacaaaggccctgaagagggaagtgtcggaattcaagccgcattggtaacaactactcaacccgacaaggcctttgcattgtcaaccccgaatgcgcgggttgatttcatcaatccagcgcctcctcctcctccgcctcctccatcaccatgtcctccgccaccatgtccgcctccgccaccatctcctccggtgaggccgtcttatactattcagattgacgccgtagtagacaacatacctatcccgacaggacgtggagatatcgcaagggttactgtgtttcaaaatggtcggccgctagcaggtgcattagtgcagtgtagcttggtatctctaagcggaaacaccagccttatgttcgctctagctgctaatgaaatagccaatctggtaagtccccctcagaatacctccgggcttacaaacatcacgatgcgaacaaacacttatgggtggttcgagataaccttcgcccagtggttccagcgaggtcaagccagattcactgcaagttccaacggagcacagaatagccgaaactttaattttacataa

SEQ ID NO: 448 - DNA, 996 bp, Brucella melitensis
atgaaagccattctcaaagtcccttgccgcaacgctctggccgttcttgcagcgtcggttgcgctggcaagtttttccgctcctttttctgcatcggctgtctttgcgcaagatgccgctccaggcactgaaaaggccgctgccacaacggcggcagcgtctgcggaaaaggacgatccgtccaaggttctggcgaccatcaacggcaaggacatcacggttggtgaggtcgatcaggctgctggcgatctcgacccgcagttcgctcgccttccggtcgagcagcgtcgccttgcagcccttgcagccctgatcgacatcaaggcgatggctggtgaagcggaaaaagacaagctcgaccagaccaaggaattcaaggaccgtatggaattcctgcgcgaacgcgcgctccataacgaatatttcaagaatgcgattgttgacaagatcagcgacgcggatgttcgcgcccgctacgacaaggaaatcgccgccatgccgccgcaggtggaagtgcgcgcgcgtcacattcttgtaaagaccaaggaagaagccgaagccatcatcaagaagcttgaaggcggcgccaagttcgaggaccttgccaaggcaagctcgaccgatggcacggcctccagcggaggtgatctcggctacttcagcgaaggccagatggtgcctgaatttgaaaaggcagcttttgcgctgaagcccggcgaatacaccaaggagccggttcagacccagttcggctatcatgtgatccagcttgaggaccgccgcaccaagcagccaccggcatatgaccaggtcaaggaccagatccgctccatcatcatgcgcgagcgctacatcgaaacggtgaagaagctgcgtgatggcttgaagatcgactataaggatcctgccatcgaaaaagccatgaaggatgcggccgctgcgcaggaagcctccggaaaggacgatgcgtcggaagacgacgccccgcaggagtag

SEQ ID NO: 449 - DNA, 534 bp, Brucella melitensis
atgggaatttcaaaagcaagtctgctcagcctcgcggcggctggcattgtcctggccgggtgccagagctcccggcttggtaatctcgataatgtttcgcctccgccgccgcctgcaccggtcaatgctgttccggcaggcacggtgcagaaaggcaatcttgattctcccacacaattccccaatgcgccctccacggatatgagcgcgcaatccggcacacaggtcgcaagcctgccgcctgcatccgcaccggacctgacgcccggcgccgtggctggcgtctggaacgcctcgcttggtggtcagagctgcaagatcgcgacgccgcagaccaaatatggccagggctatcgcgcaggcccgctgcgctgccccggtgaactggctaatcttgcctcctgggccgtcaatggcaagcaactcgtcctttacgatgcgaacggcggtacggttgcctcgctctattcttcaggacagggccgcttcgatggccagaccaccggcgggcaggccgtgacgctgtcgcgctga

SEQ ID NO: 450 - DNA, 1227 bp, Brucella melitensis
atggctaccgaaattcgcgttcccacgcttggggagtccgttaccgaggcaaccatcggaaagtggttcaagaaggctggtgaagccattgctgtcgatgagccgctggtggaactggaaaccgacaaggtgacggtcgaagtgcccgcaccggctgcgggtgttctggccgaaatcacggccaaagaaggcgatacggtcgaagtgggcgaactgctcggccagatttccagtgacggggcagcggttgccgccgcaccggcccagaagaaggaggaagccaagcctgcagccgccgctcctgctgctgcaccggtcgcatcggcttcgtcgggcccggccatgcagccggcgccggctgctgcgaagcttctggctgaaagcggtctttccgccgatcaggtcgaaggttccggcaagcgcggccaggtgctcaaaggtgacgttctcgaggccatcacgaaaggcgtttcggcggctcctgccgctccggttgccgcgcgtccggcctcctcggctgatgacgcatcgcgcgaagagcgtgtgaagatgacccgtctgcgccagaccattgcgcgccgcctgaaggatgcccagaacacggctgccatgctcaccaccttcaacgaggtggacatgtcggcagtcatggagctgcgtaacaagtataaggacgtctttgaaaagaagcatggcgtgaagcttggcttcatgggcttcttcaccaaggcagtgacgcatgcgctgaaggaaatcccggctgtcaacgccgagatcgacggcacggacatcgtctacaagaacttctgccatgtcggcatggctgtcggcaccgacaagggcctcgtcgttccggtcatccgcgatgccgaccagatgtcgattgcggaagtggaaaaggaactggcacgtctcgccagggctgcgcgtgacggctcgctttccatggccgatatgcagggcggcacctttaccatcaccaatggcggtgtttacggttcgctcatgtccacgccgatcctcaatgcgccgcagtcgggcattctcggtatgcacaagatccaggaacgcccgatggtcgtcggtggccagatcgtggtccgcccgatgatgtatctggcgctttcctacgatcaccgcatcgtggacggcaaggaagccgtgaccttcctcgtgcgtgtgaaggaaagcctggaagatccggaacgtctggttctcgatctctag

SEQ ID NO: 451 - DNA, 543 bp, Brucella melitensis
atgcatactgtgaaaaaacttctcaacgtgacagtcatgtcggcacttgccctgacggttttttcaaccgctgttcaggctgcctgtacgcagaaccgcgcaatctatcgcgaccgtgacgaggcctatacgctgacctttcgtcccgagcagccgaatgatctgaaaatgacgccggcgccgacgaacgagtttacgattacagccaatgacaagccgggtttcaagcttaacggcattgtgatctggccggaggaaggcgtggcgcgtccttatgctcttattacctataattgcaagggcgatggttccgagccggaagacctcgatgattgcagcatctggcagagcgttatctacgcattgaaggatggggccgaggctgaagtgctgcccaaggcagacgagcctgccgcacaggcggttctgtttcccgatctggtgacggcgcttgacggatatgattttggtgcagccaaacctgaaaagccgcttcaatgggaagtgttccggtttcagggatgcacacctgatgaagaatga

SEQ ID NO: 452 - DNA, 534 bp, Brucella melitensis
ttgaaaacggctatcgaccgtggcggttcgttcaaggccgagcttgatacctatgtctcggtggcgccgcaggatgcttccgtggaagggctgcgcgcctatgcggacaagggcgtgccgacaattgccgatctaaatgcatggttcggtgcggttgccaatcgcatcgtggccacggaaaacaagcttcccgccgatgccagcctatgggatcagttgctggcgagcgccagggggctggtcagcgtcaggcccgttgcgggcaatgtaagcggcaccggcgtcgggccgacgacggcgcgcatggaggcggcattacaggcaggcgatcttgaccgggccatcggcgaatgggagcaattgccagccgatgcgaaagcggtttccgaagaatttgccagccagatgaaggcgcgccgcgatgccgatgcgctggtgcagcgtcttgtggccgatagcctcaagccgaaagcgccggtgacgggtgcttccgataatacaaccggcgaggctccggcctcttccggtcagtaa

SEQ ID NO: 453 - DNA, 1578 bp, Brucella melitensis
gtgtcgatgctgcgtgtcctgttttatctcattcttgttgccgcactgggttttggttttgcctggcttgccgatcgcccgggcgaactcaatctcatcttcgcgggcaaccagtataatgtgtcgctgattaccgctgttgccggcattgtggcgattgtcgcggcggttctccttctgtggtggcttgtcaaaagccttgtccagtcgccctatacgctgcgcaggcatttgcgcacccgcaagcgtgaccggggctatcagtcgctttcgacgggcctgattgccgctggtgcaggcgatgccgatgccgcgcgccgcatgaccagacaggctggcaagctgctcagctccgatcaggaaccgctcatcaggcttcttgaagcccagacagccatgctggaagggcgtacggaagatgcccgcaagggctttgaggcgatgatcgaagacccggaaacccggcttctcggtttgcgcggactttatatcgaagcccagcgcgtcggcgcgcgtgaagccgcccgccattatgccgccgaggctgcccggcaggctccgcagcttgaatgggcttcctccgccgtcatggggcagctttgcgcggagggggattgggatggcgcattgaaactggtcgatgcgcgcaggcaggtgctggcccatggcaaggatgtggtgaaaaaggaacgcgctgcgctgctgacggcaaaagccatggcgacgctcgacacccatcatgcccatgccaaggcgattgcgctggaggcgaacaagcttgcccctgatctggtgcctgccgccgtggttgccgcgcgggcgctttttgccgatggggaaatacgcaagggatcgaagattctggaagcggcctggaagcgtttcccgcatcccgatattgcctccacctatatttatgcgcgttcgggcgataccgcgcaggaccgcctgaagcgcgcccgccatctggtttcgctgcgttccaacaatgcggaaggcagccttgcgctggcgcgtgcggcttatgaagccggtgaatattctgtggcgcgggacaatgccgaacaggtgctgcgcgctgcgccgcgtgaaagtgcctatctgctgcttgccgatatagaggaagccgaaaccggtgatcagggcaaggtgcggcaatggctggcgcaggccgtcaaggctccgcgcgatcccgcatggacggcagacggttatgtttgcgaacaatggtcgcccgtttcacccgtcacgggccgtctcaacagtttcgagtggaaagtcccggtcgtggagcttgcacccgccatcgaggtggaaaagccggaaatcaaggcgccgctgccggaggtaaaggctgtggcacccatttcggccccggaactggaaccggttcgcgaaactgccgcccctgttggcgcgcgcgatgtggtggaggccgaggtgattgtgcccgcggcggaacccgtcagtgcggatgagccggtgaaggccgggcctgcgcatatcgtggttgatgatccgggcatcgatgatgacggagccccgcaaaaggcgcaaagcagcctgcgccttttttag

SEQ ID NO: 454 - DNA, 405 bp, Brucella melitensis
atggcccttaagattcgtctcgcccgcgctggctccaagaagcgtccttactaccacgtcgtcgttgccgatgttcgcgctccgcgcgatggccgctttatcgaaaccgttggctcgtggaacccggttctgccgaaggacgccgaacgcgtgaagctcgatgccgagcgcatccagcattggattgcacagggcgcacagccgaccgaccgcgttctgcgcttcctcgatcaggctggcattgccaagcgtccgtcccgcaacaacccgaccaagggtgagccgggcaagaaggctcaggaacgtctggccctggccaagcaggctgaagaagaagccgctgcaaaggctgctgaagctgccgcagccgctgctgctccggctgaagaagctgccagcgaataa

SEQ ID NO: 455 - DNA, 624 bp, Brucella melitensis
atgaccgctcagacggttgccacttccttttctttccgccgcatttttatcgctctcggtttgaccgttctggttccgctgctttcagcctgcggtttcaacacgatcccgaccaatgaggaaaaggccaaggccgcgtggagcgaagtgcagaaccagtatcagcgccgcgccgatctggtacccaatctggtcgagaccgtgaagggctatgcagcgcatgaaaaggaaaccctgcaagccgtgatcgaggcgcgcgccaaggccacgcaggtgcagatcacgccggaaacgctgaacaatcctgcgcttttcaagcagtttcaggacaatcaggcaaacctcaccagtgcactgtcgcgcttgatggttgtcgtggaaaaatatcctgacttgaaggccaaccagaatttcctcgctctgcaatcgcagcttgagggtactgaaaaccgcattgcagtggctcgccgcgattatatcgaggcggtacgcacctataatacgtcactgcgaaccatgccgacgatgatctggacatggatctggtatcgcgatgcacagcccatgccgaccttcagcgccgatgcaggcagccaggccgcgcctaaggtcaacttcaactga

SEQ ID NO: 456 - DNA, 1131 bp, Brucella melitensis
ttgggagttccaacaatgagaaaaacacttttttcgggcgttgctcttgctgcagtcatcgccttcgggggctcggcttgggctgatgtactggtcggtatcggtattcctgtaaccggcccgaacgccgtttatggtgcacagatccagaaaggcgccgaggcggcaatcaaggaagtcaacgatgccggcggcatcaatggcgagaagattgccatcacaatcggcgatgacgtatccgatccgaagcagggtatttcggtggctaataaatttgccgccgatggcgtcaagttcgtgattggacacttcaactctggcgttaccattccggcttcgcaggtctatgccgaaaacggtattctcgaaatttcgcctggcgcgaccaatcctcaatatacggagcaggggctgtggaacacattccgcacctgcggccgtgatgatcagcagggcactgttgccggtcagtatatttttgaccacttcaaggatgcgaagatcgccgtcgttcacgacaagaccccttacggtcaggggcttgccgacgaaaccaagaagaagctgaatgaacttggcaccaaggaaaccctctatgaaggcgtgaacgttggtgaaaaggatttctcggcgctgatcgccaagctcaagcaggctggcgtgaacgtggtttattggggtggcctgcacccggaagccggtctcatcatccgtcagatggccgatcagggactaaaagcccagttcatttcgggtgacggtattgtgtcgaacgagctggcgtcaatcgccggtccggctgtcgaaggcacgctcaacaccttcggtcccgatccgcgcaacaacccggataatgccgaactggtgaagaaattccgcgacgccggttttgagccggaagcctatacgctctattcctatgcggcggttcagtcgctggctcaggccgcaaaggccgctggcagcaatgatccgcaggaagtcgccaaagccatgaaggaaaagggcccgttcaagaccgtgctcggcgatctgtcctatgatgaaaagggtgatccgaagcttccgggctatgtcatgtacaagtgggaaaagggtgcagacgggaagtataattacattcagcagtaa

SEQ ID NO: 457 - DNA, 1032 bp, Brucella melitensis
atggctcttgcccgcaaccgccgcacacagaggcatatcgattactggccgggttttgtcgatgcgctgacgacgctgcttctggcgatcatgtttctgctgactgttttcgtgctggcgcaattcctgctcagccgcgaggtcaacaacaaggatagcgtgcttgcgcgcctcaacagccagattcaggaactgacgcagcttctctcgctggagcgcagcaattcgcaggatatgcaggacactattgccaatcttcaggcctcgctttccaccgtcgaaagcgaacgctctcgcctgcaaagccttctgaacgaaggcagcggcgcgggtgccgcggctgaaaaacgcgctggcgaactggcgcagagccttgatgcggaaaagcaggtgagcgcccgtgcgctgaatcaggtggaactgctgaaccagcagatcgcagccctgcgccgccagattgccgcccttgaagatgcactcaatgcctcggaaagccgcgatcgggaatcgaacgccaagatcgccgatctcggccgccgcctgaatgtcgcccttgcccagcgtgtgcaggaactgaaccgctatcgctccgattttttcgggcgtctgcgtgaaatcctgtcggacaaggaaaatatccgcatcgtaggcgaccgtttcgtcttccagtcggaagtgctgttccccaccggctctgcggaaatcaatcccaaggggcaggtcgaaatgaagaagcttgcggacgcgatcattcagcttaatcgggaaatcccggacgacatcaactgggtgctgcgcgttgacgggcataccgataacgtgccgctggcaggcaccgggcgcttccgcgacaattgggagctttcgtcggcccgtgcaacggcggtggtgaaatttctgattgccaacggcgttccggccaaccggctcgtcgccgcaggctttggcgaataccagccgctcgacaccgccaacacagccgatgcccgcgccagaaaccgccgcatcgagctgaaactgacagaacgataa

SEQ ID NO: 458 - DNA, 507 bp, Brucella melitensis
atgcgccgtatccagtcgattgcacgtagcccgatcgctattgcgcttttcatgtcgctcgccgttgccggctgtgcgtcaaagaagaaccttccgaataatgccggtgatctgggtctcggtgcaggcgctgcaacgccgggctcctcgcaggacttcaccgttaatgtcggcgaccgcatcttcttcgatctcgattcgtcgctgatccgcgccgatgcgcagcagacgctttccaagcaggcccagtggttgcagcgttatccgcagtattcgatcacgatcgaaggccatgccgacgagcgcggcacgcgtgagtacaacctcgcccttggccagcgccgtgctgccgccacccgcgacttcctcgcttcgcgcggtgtgccgaccaaccgcatgcgcaccatttcctacggtaatgagcgcccggttgccgtctgcgatgccgacacatgctggtcgcagaaccgtcgcgccgtcaccgttctcaacggggccggacggtaa

SEQ ID NO: 459 - DNA, 807 bp, Brucella melitensis
atgggcggtgctcttgcagcagaaggcgctaaccccgccgagccggatcatttcccgatccaccatccgaagcaggaaagctggagctttgccggtccattcggcacctatgacaaggggcagcttcagcgcggtctcaaggtttataaggaagtctgctcggcctgccattcgatgaacctcgtggcattccgcacgctggaaggccttggttattcgccggaacaggtcaaggctctggcggcggaatatgaagtcgaagacggcccgaatgcggatggcgaaatgttcacccgcgccgcgcttccgacggatcatttcccggcgccatatcccaacgccaacgctgctgcagcggctaataatggagcggctccgccggatctctcccttatcgccaaggcgcgttcggtggagcgtggcttcccgcagttcattttcgacatattcacgcaatatgccgaaggcggaccggattatatccattcgcttttgaccggcttcgatgagcagccgcccgcaggcatgcagattgccgaaggtacgcactacaatccgtacttcatctcggcaaaggcgcttgccatggccaagccgcttagcgatgaacaggtcacctatgaagatggcacaccggaaacagtggatcagtatgcgcgtgacgtctcggctttcctgatgtgggccgctgagccgcatctggaagaccgcaagaagaccggcttccgggtcattgtcttcctggttctcttcgcggggcttgtttacattgccaagcgttcgatctggtcggatgtgaagcactaa

SEQ ID NO: 460 - DNA, 756 bp, Brucella melitensis
atgaaactgtcggcaagagcttcaatatttacattagcacttcttgtttcaacaaatgcttatgcatcatcggccatcgtcacatcgacggttaatctgcgcaccggccccggcacccaatatggaacaatcggtgcgataccgaacggcgtcggcattatggtggcgggctgcacccgcggctatggctggtgtcaggtctcctatggcggcatgaccggctgggcggcatcgcgctatatcgccattcaaaccggcaacggctacacgacgaacgacaatttcggatcgaccgccgcagcggtcggcataccgctcattgctggaatcgtcatcggctcggccatcgcaaacagcggccctgcctgggggcccggcccctatcgcggctggggtggcaggcccaacatctataatggctgcatcgggcgcaattgccagtcgaactggggaccgccgcgcccgcattggacggaccccccggctggcgcgacaatccgggttatcatcccaatttcggtcatggtttcggtcacggctttggtcatgggccccgcatgcgtctcggcggcaggcggtaaggcgcagcgcaaaaccgggcctcctgacagccttctgtcaggagcatcgccggattggaaaagggtgaaggggatttcgcttccacactcttttcatttgaacgctgaaattccatattgggagcatggcttcctcaaaagacaaacatatccgggattcgcgcaacaaggctga

SEQ ID NO: 461 - DNA, 399 bp, Brucella melitensis
atgactttgatgaatactgaaaacgagccgacagggatgctgaccatccgcgtttccgccatgccgaaggatgccaattcagcctatgatattttcggcggctgggtgatggcacagatggatatggctgctggaatccgttctgccgagcgcgccagggggcgcacggtgacagcagcggtgcgcgaaatggcattcgcccgaccagtgaagattggtgacacgctctgtgtttatacggatataacgcgggtgggccgtacgtccatcacgctccgggttgaagcgtgggcaaagcgctatctcagcgataagcgtgacctcgtcacgcatgctgaattcatcatggttgcgctggatgcggacggcaagcctaccccggcaccgcaggaagattag

SEQ ID NO: 462 - DNA, 753 bp, Brucella melitensis
atgaacactcgtgctagcaattttctcgcagcctcattttccacaatcatgctcgtcggcgctttcagcctgcccgctttcgcacaggagaatcagatgacgacgcagcccgcgcgcatcgccgtcaccggggaaggcatgatgacggcctcgcccgatatggccattctcaatctctcggtgctacgccaggcaaagaccgcgcgcgaagccatgaccgcgaataatgaagccatgacaaaagtgctcgatgccatgaagaaggccggcatcgaagatcgcgatctccagacaggcggcatcaatatccagccgatttatgtctatcctgacgacaagaacaacctgaaagagcctaccatcaccggctattctgtatccaccagtctcacggttcgcgtgcgcgaactggccaatgttggaaaaattttggatgaatccgtcacgctcggtgttaatcagggcggtgatttgaacctggtcaatgataatccctccgccgtgatcaacgaggcgcgcaagcgcgcagtggccaatgccattgccaaggcgaagacgcttgccgacgctgcaggcgtggggcttggccgtgtggtggaaatcagtgaactgagccgcccgcccatgccgatgccaattgcgcgcggacagttcagaaccatgctagcagccgcaccggacaattccgtgccgattgccgcaggcgaaaacagctataacgtatcggtcaatgtcgtttttgaaatcaagtaa

SEQ ID NO: 463 - DNA, 354 bp, Brucella melitensis
atgaaccgcaatttcctgtttttcgtctcagccatcgttctttttgccctcgcagcttgcgggaaggctgatgaggaaaaagctgccgcaccggcggatgggcaggccgcttcgcaacctgcgacgccggtcggaccgtctgcgggcgaaaaaggtccggatcttctgaagttcatgcgcgagaattccggtgtcatgacgccggaggaaaaagctgcggcaattgagcgtgcgcgcgccaatgcggaaacggcagccaaggcggtggggcagagtgtcgaacaggtgcaggccgccggtgaagcggcagccgttgccgcacaacgcttgctggaagagcgtcagccgcaataa

SEQ ID NO: 464 - DNA, 930 bp, Brucella melitensis
ttgcggagtgctaaaagcacatgctgcttcaaacgggaaagacgctaccagagggccggagaccgcatgacgagtttcaaattcacgggtgtgacgaaaaccgcgctgttgagtggcaccatagccgttcttatcccgctcgccggttgcgccagcaagaacgacgatatcgatctcaccaaatatgtcgagacgatcgatcctgccgacaaactttacaatgaaggcctggccaatctggatgcaggccgtcttgatgaggccgcgaagaagttcgccgctatcgatcgccagcatccctatacggaatgggcgcgcaaggcgcttgtgatggccgccttcaccaattaccgcaaaggcaattacgaagaagcgatctcgatggcgaagcgttataacacgctttacccgacctcgccggaatcggcctatgcttattacatcatcggcctttcctacttccgccagatcccggatgtgacgcgcgatcaggcggcaagccgccgcgccattgccgcgatgcaggaagtgatcgatcgtttcccgaattccgaatatacggatgacgccaagacgaaaatccgtgttgcccgcgaccagctcgccggcaaggaaatgcagattggccgctattaccttgagcgcaaggaatatctggcggcgatcaagcgtttccgcggcgtggttgaggaatattcaaacacccgtcaggtggaagaggcgctcgcccgtctggttgaagcctattatgcgcttggcctgacatcggaagcccagatggccgcttcggttctcggcaagaatttcccggacagccagtggtacaaggacagctacaagctcttgcagagcggcggtcttcagccgcgcgaaaatggcaattcgtggctggccaaggctggggcgctcatcaccggcggcagctcataa

SEQ ID NO: 465 - DNA, 1575 bp, Brucella melitensis
atggcaattgcaccaaaggcgggttttgctcgcacccttttcgcaaccgttgcactgggggcgatgagtgtcgcgggcactgtgtcgatgggaacgccgcccgcgctggctgcgcaaggtcccgcttcggtggccgatcttgccgaagggcttctggatgcagtcgtgaatatctccacatcgcagaccgtgaaggacgatggcgagggggacggcccggtgccgatgccgcaggtgccggaaggttcgcccttccaggaattcttcaaagacttcttcaatgacaaggatggcgcgcagggcgatgattcacgcaaggtgcagtcgctgggttcgggtttcatcatcgatgccgaaaagggttacatcgtcaccaacaatcacgtcatcgccgatgccgacgagattgaggtgaatttcaacgatggttccaagctcaaggcggagctcgttggcaaggatacgaagaccgatcttgcgatcctgaaagtcgacccttccaagcataagctcaaggcggtgcatttcggcaattcggaaaaggcgcgcattggcgattgggttctggcgatcggcaatccgttcggccttggcggtactgtcacggcaggcatcatttcagcacgcaagcgcgatatcaattccggcccctatgacgatttcattcagacggatgccgcgatcaatcgcggcaattccggcgggccgctgtttgatatggacggcaaggtgatcggcatcaatacggcgatcatttcgccttctggcgggtcgatcggcattggttttgctattccggcggaaatggccgccggtgtcatcgatcagttgaaggaatttggcgaagtgcgccgcggctggcttggcgtccgtcttcagccggtgacggaagacattgcccagagccttgggctgaaagagaccaagggcgcgctgattgccggtctcatcgaaaattccggtgtcgataacaaggcgatagaggcgggcgatgtggtgatccgctttgacggcaaaccggtggatacggcgcgcgatcttccgcgcctcgtggcggaaagaccggttggcaaggaagtggaaatcgtcgttatccgtcagggcgcggaaaagaccctgaaggtcaagcttggctgtctggtcgaggacgacaagagcacggagccggcggttgaagatcaggtgcccgcgccggatgacggcgaacagccgggagcccggcaggagacgccggacaagtcggacaagccgaagaaggaacacaagagcgatgctgctccaagcgttctcggcatgaagctcagcaagctcgatgatgatattcgcggcgagtttggcattgccgaagatgtggagggcgttgccatcctctatgttgcaccggggacggctgccggcgaaaagcgcatcgaaacgggcgatgtcattgtcgatatcggtcaggtgacggtgaagacgccggaagatgtgaaaaagcgtatcgatgcactgcgccgcgaggggcgcaagaatgcgcttttgatgctggcttcgcgttccggggagttgcgtttcgtgacgatccgtatcgactga

SEQ ID NO: 466 - DNA, 570 bp, Brucella melitensis
atggccgaggcgcatcggctgaatctctttgcaacggtcgaaggcggcaccgttcatggctatgggtttttcgtcggcggaggccgtcccagcgaagcacaacttatcatccgcaatgcccagggcgtcgagcttttcaagggacctgccggcgaggatggcagtttcagcttcacgcccgcagcacctgccgatctggttttgaccctcaacgcaggcgacggccatgtggccgaagcccatatcgccgccgaccggttctcccaatatggcgcacaaggcgcggccagttccaccaaggcagaaacgggcaccgccacccccaagggggctgccttgcccgcatcgccctcaccggaagaactgagcgccatgatcgaccaaagcgtggatcgcgccgtttcgcgtcagatcgcaccgctattggaggcttatgccgaggccgatggccgtgcccgcttttccgacatcgtgagcggcattgccgtcatcatcggtcttgcggggctttttctctgggccaaatcgcggggacgcgccagccattcagaccggcagcgtgagccatga

SEQ ID NO: 467 - DNA, 375 bp, Brucella melitensis
atggctgatctcgcaaagatcgttgaagacctttcggccctgaccgttctggaagccgctgagctgtccaagcttctcgaagagaagtggggcgtttcggctgctgctccggtcgctgttgctgctgccggtggcgctgcccctgctgctgccgcagaagaaaagaccgaattcgacgtcgttctcgctgacggcggcgctaacaagatcaacgtgatcaaggaagtgcgcgcactcaccggtctcggcctcaaggaagccaaggacctggtcgaaggcgctccgaaggctgtcaaggaaggcgcctcgaaggacgaagctgagaagatcaaggcacagctcgaagctgctggcgccaaggttgaactcaagtaa

SEQ ID NO: 468 - DNA, 699 bp, Brucella melitensis
atgcgcgcggaatcgcaaattgaggataaccatttcatgctgaagaaaaccggtattgccctgatctgtgccacatttctggcagggtgcaccacggacccatatacgggccagcaaaaagtatccaatacgacgggcggcgcggccatcggcgcggctgtcggtgccttgggaggcctcatggtgggcggttccagccgcgcacaacgcaatgccgtgctgattggtgccggtattggcgctcttggcggtggtctcatcggtaactacatggaccgccaggaggctgaattgcgcgcgcaattgcagggcacgggcgtttccgttacccgtaacggcgacagaattatcctgaacatgccgtcgaacattactttcgatacggatcaggatcaggtcaagagccagttctacccgacgctcaactcggtggctatcgtcctgcgcaagttcgacaagacgctcgtggatgtttacggcttcaccgattcaaccggaagcgccagctacaaccaggccctgtcgcagcgtcgcgccgcttcggtggcaagttatctcgattcgcagggcatcgacccccgccgctttgccgttatcggttatggtgcaagccagcctattgccagcaacgcgacgccggaaggccgtgcacagaaccgccgcgtggaaattcagatttcgccgctacgcggagcctga

SEQ ID NO: 469 - DNA, 2658 bp, Brucella melitensis
atggctggcgtcaacgagattaggtccacatttctcgactattttcgcaagaacgggcatgaggtcgttccatcaagcccgctcgttccgcgcaacgatccgacgttgatgttcaccaatgcgggcatggtgcagttcaagaatgttttcacgggccttgaacatcgctcctataaccgcgcgaccacatcgcagaaatgcgtgcgcgccggcggcaagcacaacgacctggacaatgtcggttataccgcgcgccatcatactttctttgagatgctcggcaatttttcgttcggcgactatttcaaggaagatgcgatcagctttgcctggaacctgatcaccagggaattcggccttccaaaggacaagcttctcgtcaccgtctaccacacggatgatgatgcggcgaacttctggaagaagatcgccggcctttccgacgaccgtatcatccgcatcccgaccagcgataatttctgggcgatgggcgatacgggaccgtgcggaccatgttctgaaatcttctatgaccacggcgatcatatctggggcggacctcccggatcaccggaggaagacggtgatcgtttcatcgagatctggaacctcgttttcatgcagttcgagcagcagacgcctgaactgcgcatcgatctgccgcgcccatccattgatacgggcatggggcttgagcgtattgcggctgtcttgcagggcgtgcacgataattatgacatcgatctcttcaaggcgctgatccgtgcttcggaagaagcaaccggcgtcaaggctgaaggcgatttccgtgcaagccatcgtgtgattgccgaccatctgcgtgcttcgagcttcctgattgccgatggcgttctgccatccaacgaaggccgcggttatgtgctgcgccgcatcatgcgccgcgccatgcgccacgcccaattgctgggtgcaaaagagccattgatgtggcgcctgttgccagctctcatccgcgaaatgggacaggcctatcccgagctgatccgcgccgaatccctgatttccgaaacgctgaagctggaggaaacccgtttccgcaagacgctggaacgcggccttggccttctgtccgacgcttcggaaaatctcgccgaaggcgaccgcctcgatggcgagactgcgttcaagctttacgacacctatggttttccgcttgatctgacgcaggatgcgctgcgccagcgcggcattgccgtcgatacggaaggcttcaatgtcgccatggaacgccagaaggccgaagcgcgcgccaattggactggttctggcgaagctgcgaccgagacgatctggttcggcatcaaggataaggtcggtgcgaccgagtttctgggctatgaaaccgaaagcgctgaaggtgtgatcgcatcgctcgtacgtgatggcgtggaagtgccgtctgttcgggagggcgaaaccatatcggtggtggtcaatcagacgccgttctatggcgaatccggtggccagcagggcgatacgggcacaatttccggcgaaggttttgtgattgccgtcaaggatacccagaagaagggcgagggcgtcttcgttcatatcggcgaagtcaccgaaggaacggcaaaggctggcgatgttgtggaactgaaggtcgattcggcccgccgcacacgcattcgctccaaccattcggcgacgcatcttctgcacgaagctctgcgcgaaacactcggaacccatgtggcgcagaagggctcgctcgttgcgcccgatcgcctgcgtttcgacttttcgcacccgaagcccatttcggctgaagagctggaggctgtggaaaatctcgcaaacgagatcatcctgcaaaatgcgccggtcacaactcgcctgatggctgtggacgatgcaattgccgaaggcgcgatggcgcttttcggtgagaaatatggtgacgaagtgcgtgtcgtttccatgggtacggccaagcatggatcgaaagcgggcaaggcctattcggtggagctttgcggcggcacccatgtgcgccagaccggcgatatcggcctcgtccgtattatatcggaaggcggggttgccgcaggcgtacgccgtctggaagcgttgacgggggaggctgcccgcctttacctcgaagaacaggatgagcgcgtaaaggctattgccagtgctctcaagacgacatccgcggatgtgctggaccgcgtcaatgcgcttatcgatgagcgcaagaagctcgaacgtgaattggccgatgcgcgcaagaagctggcgcttggcggcggttcgtccgatggtggcagtgctgtcgaggcggtcaatggcgtcaatttcctcggcaagatcgtgacaggcgtttcgccgcgcgatctgaagccgcttgccgatgaaggcaagaagcaggtcggttccggtgttgtgttgttcattggcgtgggtgaagatggcaaggccagcgccgttgccgcagtcacagaggatatggtaggccgcttcagcgcggtggatctggttcgcgcagcttcggcggcccttggcggcgccggcggtggcggacgccccgatatggctcaggccggtggtcccgacggcgccaaagctgccgatgcaatcgcggcggtcaaagcgttgatcgcctga

SEQ ID NO: 470 - DNA, 795 bp, Brucella melitensis
ttgttttacggattttccaagattttctggctgtttttccagccccttacgattatttttcttctggtggcaattggtcttcttgccgcctggcgtggttttcggcggctaggtatcgcggtgctcatacccgcgacggcgctcctctttttcggcgccttcaccaccggtggcgcaatgctgctgtcgcctctggagaaccgttttcccaaatccgaaagcctgccacaacatgtggatggcattatcgtgctgggcggctacatgaacggggaaattgttgccgggcggcagaatttcgagcttaacagtgctgctgaccgcatcgtcgagaccatgcggcttgcccggctttatcccgatgcgaagatcctcgtttccggcggtgaagggactttttttgaaaaatcggcgcgggaggcggagactacccgcgcgcttctgttggatcttggtttttccggcaatcgctacatttttgaaggcaaatcacgcaatacggtggaaaatgcgattttctcgcaggctctggcgcagcccaagccgggcgaaacatggcttctggtgacctcggcctatcatatgccgcgtgcggttggctgtttccgcaaggcggggttcgacgtgacggcctggccggtcgattacaaaacccgcacgcgggagacgtttggcctttatctcgaatctcccaatgacgcgctttcgcggttcagcatggctttgcgggaatggacggggcttgccgcatattggtggacaggccgcacagatatgcttctgcctcattcctga

SEQ ID NO: 471 - DNA, 1419 bp, Brucella melitensis
gtgcgtaccgcattcagtaaagtcgcatatgccttgaaaaaagcggcacaggtctctcttcttctaacagccgtgacgggttactccacggtttcctccattgcaccggccatggcgaaaggcgacaacagatatgccgcgatcgtcgttgatgcgaacaccggcaagacgcttttctcggcaaatgccgatgcacagcgctatccggcgtcgctgaccaagatgatgacgctctatatgctatttgaagccatccacgccggccgcatcaacaaggatacgcgcattcccgtgtcggcctatgccgcctcccgtccgcccacgaagatcggctttcgtcccggccagtcgattcgggcggaagatgcggcccttgcgatgattacgaaatccgcaaacgacgttgctgcggcagtcggtgaatatcttggcggctcggaagaacgtttcgcccagatgatgaccgcaagggcgcgccgccttggtatgcgcaacacgaccttccgcaatgcgtccggcctgccgaacatggcccagcattcgtccgcccgcgacatggccatccttggcatggcgctgcgtcgccatttcccgcgtgaatttgcctatttctcgcgcagcagcttcgatttccgcggccaaaccatccgtggccataaccggcttcttggccgtgtcgaaggcgtggacggcatcaagacgggctataccaacgcttccggttacaaccttgtttcgtcagtcaatctcgatggtcgccgtctcgtcgccgtcgtgatgggcggcaataccggcgcaagccgcgatgcccacatggcccagcttattcgcaaatatctgccgatggccgcccgtggccgtaataacgatgctttgattgccgcgcgcagtgaagccccgcaggttgtggcttccatcgacctgccaaaaaccaaacgtgcaccggtgcccgtcgcccgcatcgccgtcgaggacatcatcaatgccgaaatcggtgaaggtgatatcgaccagccgcaggttctggccctcgtagcccccaccccgcgcccggcggctctggccgctcaggcagccgtacttccgacgccgaaggcccccgttcggccaacgcaggccccggcacaagatgtggatccggtgacaacggcatccgcatcggctgcaagcggctgggcgatccagatcggctcgctcccgagcgaaggacaggcccgcgatatgctggccaaggcgtccgccactgctggccgcacactgcgctccgcttcgccctatacggaaaccttcaacaagggtagcgccaccttctatcgcgcccgtttcgtcggctttacctccaagcaggcggcctgggatgcttgcgcctcgctgaagcgcaataacttcggctgctatgcggtagcgaactcgaactga

SEQ ID NO: 472 - DNA, 795 bp, Brucella melitensis
atgtgggccggatttgcgggtgcggccagtgcggcgtcagcggtcaggttggttccccatcgcgcaatctatgatctgaccctggatcgtgccgatgaaaaatcgggaatcagtggcctgaccggccgtatggtctatgaattcaacggttctgcatgtgaaggctataccaccaatttccgctttgtgacgcgggtcgacatggacgaacagccgcagcgcgtcaccgaccagcaaaccacgaccttcgaggatgcggacggaaaggactttcgtttcgtcaacaagacctttgtagacaaggaactggtcaaggaagtgcgtggcgatgccaagcttgaggatggcaagaccgtcgtcaagttgagcaagccgaaggaaaatacgctcgatctgaagggaacgcagtttccgacccggcatatggaagagctgatcggcaaggctgaagcaggccagaaattctatcagacgacgcttttcgacgcctcggaagatgccgaccgggtggttgccaccaccgtcgtcgtgggcaagcagcaggctgtgccggatgatgagaccaaggttatgggcaagttttcaaaggatcaggtctggcccgtcacgattgcttacttcgatgacaaggaacagcaggacggaatgccgatctatcgcatcaatttcaaactctaccgcaatggcattacccgtgatctgaccatggattatggagatttctccatgcgcggaaagcttgtgaagcttgatatctatgacacaggaaaaaataagactggatgcagtaaatag

SEQ ID NO: 473 - DNA, 390 bp, Brucella melitensis
gtgcttatccagcgttcagagggcggtggtcttggcattggcggcggttcgggtttcatgacggcacgcggcgcagccaatgcgctcacacgcacgaccgccattctggcgatcggtttctttgccacatcgctgctgcttggcataatggcgcgctacggcgagcgtccgacggatattctcaatcgtattccggccacaaccggcagccagagcgcaccggcaggtggcagcacaaatggcggtggcattctcgaccagcttggtggcgagccttccggctccggcaatggggcagcgcccgctgctccggctgcgccggcccagcccgatgccggacagccgcaggctccggcagccccggcaaatccggttcccagctcgcaataa

SEQ ID NO: 474 - DNA, 648 bp, Brucella melitensis
atgggagccgctgctcctgcctttgttgcttcgccggtcaatgctgaagcgcagctcgatgaagctgcggcaaatgtccagaaggtcgctctggcgagcaacgccaaggcaaacccggacaagccgaagaagaaaacggctgccaggaccaacaatacggccaaggccaacaaatatagcatcgatccgaagtttcgtccgcaggacgtgaccttcaccggctacaagcccggcacaatcgtgatcgatcccaagaagcgcttcctctatctggtggaaacttccacgaccgcgcgccgctatggcattgccgttggcaagcagggactggaatttcagggcaaggccaccatcagcgccaagcgcgaatggccgcgctggattcccaccaaggaaatgattgagcgcgatccggcccattatggccgcttcaagaacggcatggatggtggcccgggcaatccgctcggctcgcgtgcgatgtatctcttccagggcaacaaagacacctatatccgcatccacggtacggtgcagccatggaccatcggcagctctgcctccaatggctgcttccgcatgatcaacgaagacgtgatggatctctacgaccgcgttacgcttggtacggaagtggttgttctgtaa

SEQ ID NO: 475 - DNA, 1041 bp, Brucella melitensis
atggcaccgagggctaaaaaggcgcctgctggcaaaacgcaggcgtcttccgtgaatgcacccaaggcaccttcgcctgcgaatttcgacaagaagcaggagttggaagcttatcgcgaaatgctgctgatccggcgttttgaagaaaaggccggccaactttatggcatgggttttattggcggcttctgccacctttatatcggccaggaggccgtggtggttggcatgcagatggcgttgcaggaaggcgatcaggttatcaccggctatcgcgaccatggtcatatgctggccgtgggcatgagtgcgcgtggcgtgatggccgaactgaccggacgccgcggcggcctttccaagggcaagggcggctccatgcacatgttctccaaggaaaagaatttttatggtggccatggcattgtcggcgcgcaggtttcgctcggtacggggttggccttcgccaatcactatcgtgagaataaatccgtttcgctgacctatttcggcgatggtgcggcgaatcagggtcaggtttatgaaagcttcaacatggcctcgctgtggaagcttccggtgatctacgtcatcgaaaacaaccgttatgcgatggggacggcggtttcgcgttcttccgctgaaaccgatttttccaagcgcggcctttccttcaatatccccggcattcaggtcgatggcatggatgtgcgcgcggtaaaggcggcagccgatcttgcgaccgaatgggcgcgttccggcagggggccgatcattctggaaatgcttacctaccgctatcgcggccactccatgtccgatccggccaagtaccgctcgaaggaagaagtgcagaaaatgcgctccgaacatgatccgatcgagcaggtcaaaaaccgcctgatcgaaaagggctgggcaaccgaagaagagctgaaggaaatcgacagggaagttcgggacattgtcgctgatgctgccgattttgccgaacatgatccggagccggatgcgtccgagctctatacggatattctgctctaa

SEQ ID NO: 476 - DNA, 1095 bp, Brucella melitensis
ttgatcgggttcaatctgttccgctcgaagatgatcaaggatttttttgccaatatgcagcagccagcgcagacggtttccaccgtaaccgttgagcccggtgtgtggcagccgggcgtggaagccatcggcaccgccagcgcgctcaatggcgtcgatctgaccgtgcagcttgacggtgtcttgcagaagatcaacttcaaggccaatcaggacgtgaagcagggcgatattctcctgcaaatggaagacagtatccagagggcggaccttgccgccgcggaggctgaggccgttcttgcccagcagaatttgaagcgcgccgatacattgcgtacgcgcggcgtgggcgcggtatcgaatgtcgatacgactgccatgccggcgaatgccgctgtcgcactggtgaaaaagatgcgcgccacgctggcgcagaagtcggtcaaggctccgttttcgggcgtcatcggcattccgaaggtcgatatcggccagtatctgacgccgggcacggtgatcgctaccttgcagaatatcgatatcatgcgcattgattttacggtgcccgaacagctgcttgcaaccataaagcttgggcagaccgtgaaggtgggttccaatgcggacacacttgattttacaggcaagatcgtcggcattgaccccaagatcgacccgaccacccgcctggtttccgtgcgcgcggaggtggataatcccgatcacaagctgacgccgggccaatttgtgcaggttcgcgtggaactgccggaagaaagcaatgtgattgcactgccgcagacctccatcgtgtcgagcctttacggcgattatgtctatgtggttcgccccgaacagaagcaggaaagcgcgaaggcgagcgaagccgcaaaggtgcaagagggccagaaacaggtggcgcagcaggtctttatcaagcttgggcggcggtctgcaggcaatgtggaagttacaagcggcctgaagcccggcgacatcatcatcactgcgggacagaaccgtctttcatccggtgttccggtaaagatcgacaatacggtcaatccgtccgggaacccggctgacaggcaatag

SEQ ID NO: 477 - DNA, 966 bp, Brucella melitensis
ttgcgcgacggcgtagtctggcgcgcggttgcagctacactggttgcttcgcctgccttcgcacagggtgtcgatccaaccgcaggcaccggtctcagcctgcccgagccaaaactcaatctgccgacaatcaatccttatgcctcgcctgccagccctgaaaacaatccgctggtccggacctacgaactcgacctgaaggcgaagctgacacaggagggcggcgatatccctgccggcctcgtctggcgcgttttttcccccgatgtgggaccggatggtcaattgcctctcatagcctcatccaagggtggaagcgcctcgttcaacctgccggaaggcagctatctcgtgcacgtagcctatggacgcgcaggcgccaccaaacgcattacgctttccaattctgcccgccacgaaatcatgattctggatgctggcggcatgaaacttagcgccgtcctgcccggtaatggcaagatcaaggacgatctgctgcgcttttcaatctatgccgacgaggaaaatagcgaccgttccctgatcgtgccggacgtaaagccgaacaagatcattcgcctcaacagcggaacctatcatgtcgtgtcgaattacggcacggcaaatgcaatcatccgcgccgatatccgcgtggaagccggaaagctgacagaggcaacggtgcagcaccgcgccgccgaagtaacgctcaagctggtgcgcgaccatggcggcgaagctctggccgacacatcctggtcgatcctcaatgcctcaggcgatgttgtacgcgaaagtgctggcgcctattcctcgatggtgctgatcgagggcgattatgtggccgtcgccaagaacaaggatcgcatctatcagcgcgatttcaaggtcgaatccggcaagaacgaggacgtcgaggttcttgccaacagcgattcggaagcctccgatgacattgtcgactga

SEQ ID NO: 478 - DNA, 1608 bp, Brucella melitensis
atgggccgactgattttcatcggctttcccggacttggacttgttgcgtcacatcttccacaccggaatggtccagcagaggaagggacccgaaatcagttcgggcacgacagcgcaagtcgccagagagttttccggcgtcccgtcgttatcattaaatggaattatgttcggcaagttgcgcttgcccggcgttttaaagcggaccgcgaatgcgcggtgccgctgaaagagattgaattgacaaaagaaaacacgggcggcttcgccgctctcggtatcaccggcgttctgctcaaaggcgtggaagctgccggcatgaccgagccgaaaccgatccagacgcaagccatcccgtcgcaacttgaaggccaggacatcctcggcatcgcccagacgggttccggcaagacggcggctttcagcctgcccatccttcagaaaatcatcggccttggcgacaagcgccgcccgaaaaccgcacgcgcgctaatcctggcgccaacgcgtgaactggcagtacagattgagcagacgatccgcaatgtctccaaaagcgcgcatatctccaccgcgttggttctcggcggcgtgtccaagctttcgcagatcaagcgtatcgcacccggcatcgatgtgctcatcgcaacacccggccgcctgacggacctgatgcgcgatggcctcgtggacctgtcgcagacccgctggctggttctcgatgaagccgaccgcatgttggacatgggcttcatcaatgatgtgaagcgcattgccaaggcaacacacgccgaacgccagaccgcactgttctcggctaccatgccaaaggagatcgcatcgctggccgaacgtctgctgcgcgatccggtacgggtggaagtggcgccacaaggcgccacggcttctgaaattacgcaggtcgtgcatccagtgccgacgaaggagaagcgccgcctgctttcagccatgctgaccgatgccgacatgcgttccgtcatcgtcttcacgcgcaccaagcacggagcagatgccgtcgtgcgccatcttgagcgcgaccgctatgatgttgcggccatccacggcaataagtcgcagaatgcacgccagcgcgcgctgaacggtttccgcgatgggaccctgcgcattctggttgcaacggatattgcagcgcgcggcatcgacgtgcccggcatcagccatgtggtgaattacgacctgccggacgagccggaaacctatgtgcaccgcatcggccgcaccggccgcaacggcgcaagcggcgcttccatcacgctttatgatccggctacggaagaatcaaagctgcgggcggttgagcgcgtcacgcggagcaaactttcgatcaaggatgcgccggtgaagcttgcaccagcacctgtcgccaaaggccccgcaccccagggccagcggactgaacaggctgagagccgcaaggcgcccgcgcacaagcatcgccgccccgcacagaaggcgggcgagcagcatcgcgccggggcacatgccagcgccggtgaggccgcgccgaagccgaagcgtcccttccgccgcaagcgccgcagcaatggcggccagcgcgccgcctga

SEQ ID NO: 479 - DNA, 360 bp, Brucella melitensis
gtgtacacgatccgcatcatgaactgtgccttttttgcgcatcacggtgtcttcgatgaagaacacaagctcggacaacgattctatgtcgatgccgttctggatgttgatgagggcaactcgctggaaagcgacaatattgacggaacagttcattacggaattgccttctccgtcattgaaggcatcatcatgggccgccagcgttatctgatcgaaaccctcgcgcttgatgtcgccaaggcgctcgtcgcacggtttcctcagataaagcgggctgagatcacgatccgcaagccgaatgccccggtttcgggcgtcctcgattatgtggaagtaaccgtggtttacccccagtga

SEQ ID NO: 480 - DNA, 996 bp, Brucella melitensis
atggaaacaaaagccaattacgtactggtaggggttttcacgttgctcgtaagcctgttggctttcggcttcgtgtactggattgcgcgctatggcgaagcgcgcgattccctgcctctggatgtgcgcattcagggttcggtcacgggccttggtattggtagccaggtgcttttcaacggtatcaaggtgggcgacgtgcgccggctgcatctcgatgacagcaatccgggcatggtgattgtgcagacacgcgtgaacgcgaccacgccgatcacacgttcgaccacagcaacactgggctttcaggggcttaccggacaggcttatatcgaactgaaaggcggccggctggatgagccgaaccttttgacggaggcggcgaaggaagacacggtcgcgcgtattgacgccgatccgtctgccgtgaacaatcttctggcaaccgcgcaggatattgccgcgcgcgccaacaatgtgctgagccagcttgaaggtttcgtgaaggacgcccgcggcccgctgacggacacgatcaacaacaccaaaacctttacgcaagctttggcggataatgccgatatcattcaggagcttggccagaatgccggcaatattcgccagatcgtcgtggacgcgaaggatatgatggcgcgtttgaatgcggcgtccgtcaaggttgaaagcattctgaataaaactgacaagatgttgtctgccgacgacaagaacggccttgtcgcgcaggcaatcacgacattgcaatcaattcgtgaaacctcgaataatctcgacgcgcgccttgcgccgattgccaataatctggaccgtttttccggacagggcctgcgcgaaatgcagggtgtcgttattgacagccgccgtgcaattcaacgtatagaacaagtcattaccgagcttgagcgtaatccccagcgccttatcttcggcgggccggtgagtgtgcctcaatatgatgggaggaagcgtcattga

SEQ ID NO: 481 - DNA, 2733 bp, Brucella melitensis
atgcttgagaagacctatgacgccgcggctacagagccgaaaattgccgaacgctgggaagaagctggtgcattcaaggcaggcgcaggcgcaaagcccggagccgatccgtttgctgtggtcattccgccgccgaatgtgacaggctcgctgcatatgggccatgccctcaacaataccattcaggacatcatggtccgtttcgagcgtatgcgcggcaagaatgtgctgtggcaaccgggtatggaccatgcgggcattgcgacccagatggttgtcgagcgccagcttgccgaacgcaaggagccgaaccgccatgccatgggccgtgaaaaattcatcgaacgcatctggcaatggaaagccgaatccggtggcatgatatccaatcagcttcgccgtctgggtgcttcctgcgactggtcgcgtgagcggttcaccatggacgaagggctgtcccgcgcggtgctggaagtctttgtcacgctttacaagcagggcttgatctatcgcgacaagcgccttgtgaactgggatccgaaacttttgaccgcgatttcggatatcgaggtcgaatcccgcgagatcaagggccatttgtggcatttccgctatccgctggaaaatgttcctttcgacccggaaaacccgcatacctatattatcgtcgcaacgacccgcccggaaacaatgctgggcgatactggcgtggccgtcaatccgaaggatgagcgttatcatgctcttgttggaaatgacgtcatcctgccgcttgtcgggcgacatattcccattgtggcggatgattatgccgatccagaagccggttccggcacggtcaagatcacgccggcgcacgacttcaacgatttcgaggtcggcaagcgcaataatctgcgcgctatcaacatcctcacgcccgaagcagccattacgctcaaagataatgtcgattttcttgaagatcttgagctgacagcggaactgaaggcacttatcgtcgaactcgacggaatggaccgctttgccgcgcgcaagcgcatcgtcgaactgatggatgagcgtggctatcttgaaaagatcgacgatcacacccacgcggtcccgcatggtgatcgcggcggcgttcccattgagccatatcttaccgaccaatggtatgtgaatgccggtgagctcgccaagcctgccatggcggcggttcgtgatggccgcacacagattgtcccgaagaactgggaaaagacctatttcgactggatggaaaacatccagccatggtgtgtctcgcgccagctctggtggggacaccagattccggcctggtacggaccggatagccattgctttgtggaaaagagcgaagctgaggccaaggccgccgcacgcgcccattacggtgaagacgttgcgctggagcgtgatacggacgttctcgatacgtggttctcgtctgccctctggccgttctccacgcttggctggccggacaagacaccggaacttgcaacctattacccaaccagtgttctggtgacggggttcgatatcctgttcttctgggttgcccgcatgatgatgatgggccttcatttcatggaggaaatcccgttccatacggtctatctgcatgcactcgtccgcgacaagcatggcgcgaaaatgtcgaagtcgaagggcaacgtcatcgaccctctcgaactgatggacgaatatggcgcagatgccttgcgcttcacgctggccatcatggcagcgcaggggcgtgacgttaagctcgatccggcccgcatcgccggctaccgcaatttcggcaccaagctctggaacgcgacgcgctttgcgcagatgaacggcgtgaagcttgcccccgatttccgcccggaaaatgcaaagcttgccgtcaatcgctggattttgaccgaattgacccgggcaacacgcgcagtgacagaagggattgccacctatcgcttcaatgaggcggcgggtgcggcctatcgcttcgtatggaaccagttctgcgattggtatctggagtttctgaaacccatcttcatgggggatgatgaggcagccaaggcagaggcacaggcaacagccgcctattgtctggatcaggtctacaagctcctgcatcctttcatgccgttcatgacggaagagctttggtcgctcactgctagcgaaggcaagaagcgcgacaccgttctggcattggctgaatggccggaattgtccttcgaggacgaagatgcggctgccgacatcaactggctggttgatcttgtgaccggtattcgctctgttcgtgcggaaatgaacgttcctgcaggtgcgattgcgccggtcgtggttctggacgccaataaggtgacagtcgatcgctttgcccgccacgatgcggcaatcaagcggcttgcgcgcgtggaacgcatttcctttgagcaacaggcgccaaagggggcagcgcagatgctgctgggcgaggcgacgatctgcatcccgcttggcagcctgatcgacctccaggccgaagcggctcgccttgccaaggaagcaggcaagatcgccgctgaaatggatcgtatcgagaaaaagctcgccaatgagaaattcgttgccaatgcgcgcgaagaagtcgttgaagctgagcgcgagcggctgctcgaactcaaggaggcagcgcagcgcgttgcaactgccgagtcacgcatccgtgatgcaagctga

SEQ ID NO: 482 - DNA, 753 bp, Brucella melitensis
ttggttgcgcttggtatcggatattgtgccggtacggcgcgacaggcctccaagcctgtacaggctgcaacctccaccgttgcctttaacccgaaggccgtcgaaaacatcgtgcgcaattatctgcttcagaacccggaactgatgctggaagtgcagaccgcgcttgaaaccaaacaggctcatgcggcacaggaacaggtgaagcaggtactggccgccaatcagagcgttcttttcgaccccaagcatgatgctgtctttggcaacccgaatggcgacgtgacggtctatgaattcttcgattacaattgcggctattgcaagcgcgcgcttcccgatatggaagcgatcctgaaaaaagatccgaatgttcgttatgtcctcaaggagttcccgatcctggggccggattccatgcgtgcgcatgtggtctcccaggctttcaaggcgctgatgccggagaagtacccggaatttcatgaaatgctgcttggcgggcatgggcgcgcaacggaggaatccgcgattgccgacgccgtaaagctcggcgccgatgaagctaagcttcgtgaaaaaatgaaggacccggccatcaccggcgctttccagcggacctaccagcttgcgcaacagctcaacatcaccggcactccgtcctatgtcatcggcgacgaactggtgcccggcgctattggtatcgatggattgcggcagagaatcgcggccgcccgggacgctgcaaagaagtaa

SEQ ID NO: 483 - DNA, 1437 bp, Brucella melitensis
ttgaaggcgctgatcaaaggcgataagggaattgccatgtcaaacaataccgatctctcccccgttcacgtcattggcggcggccttgccggcagcgaagccgcctggcagatcgcacaggccggcgtaccggtcgtgctgcacgaaatgcgcccggttcgcggcaccgatgcgcacaagaccgaacagcttgcagagctcgtctgctccaactccttccgctccgacgacgcagaaaccaacgccgtcggtgttctccatgccgagatgcgccttgccggatcgctcatcatggcttgcgcggatgcccatcaggttcccgctggcggtgcgctggccgttgaccgtgaaggcttttcgcaggccgtaaccgccagactggaagcccatccgctcatcaccatcgagcgcgaggagatcaccggcctgccgccgaccgaatggggaacgacgatcatcgccaccggcccgctgaccgcaccgtcgctggccgaagccatcgccgctgaaaccgatgcggatgcgcttgcctttttcgatgcaattgcgcccatcattcatttcgattcaatcaatatggatgtgtgctggttccagtcgcgctatgacaaggttggtcccggcggtactgggaaagattatatcaactgcccgatggacaaggagcagtacgaagccttcgtcgccgccctcatcgaaggcgacaagacggacttcaaggaatgggaaggcacgccctatttcgatggttgcctgccgatcgaggtgatggctgagcgcggaccggaaacgctgcgtcacggcccgatgaaaccgatgggccttaccaatgcgcataacccgactgtgaagccctatgcggtcgtgcagttgcgacaggacaatgcgcttggcacgctctacaacatggtgggtttccagacgaagctgaaatatggctcgcagacgggcatttttaaaatgatacccggcctggagaacgcggaatttgcacgccttggcggcctgcaccgcaacacctaccttaactctcccgtattgctcgacaatgttctgcgtctcaaatcccgtcagacattgcgttttgcaggtcaggtaacgggttgtgagggctatgtcgaatcgtcggccatcggcctgctggccggtcgctttacggctgcggaaaagcttagtcaggctgccgtgccgcccccgcccacgacggctttcggcgcgctgcttggccatattaccggtggccatatcgttaccgatgacgaacccggcaagcgttccttccagccgatgaacgtgaatttcggcctgtttccgcccgttgacgtacccaaacccgaaggcaagcgcctgcgcggcaaggaaaagaccattgccaaaaagcgcgcgctttccgcacgcgcccttgccgattgccgaaactggctcagcttgtactga

SEQ ID NO: 484 - DNA, 1284 bp, Brucella melitensis
atgcgtttaccaattttgcagcatacgtccgaacgtctcctgcggaatgttgcaatcgttctgattgccggttttggagccgggtgcagtgctgatacgatgcgcttcacagacggcatttttactggttctacgtccagtcagcccgtcgcgcagcaacccgcaggcaatgtttatgcgtctgcccccgtggcttcggccccgccggtttcaagcggaacggtccagcgcaattccttgccgccggtatcgtcagcgcctctgggtgcgcctgtcgctgcggcatcgacgcagatgcgcaatcaggtcgatcaagcccaggatatggcggcgtcccgcgtcaataataccgttaatgccgctgaaaccagggtcgcaagtgccgccaccgttacgcataatacggtgaatggcgcgaaggaaaaggttcttggccagcttccggcgacggggcagggcgcgccgcgcccgatggacaacaatatcgctggcgttccgcaagcacctgctgtcaacggcaagaaatcctcgccgaccaatatggcatcggctggcggcgctatcgcaaccccgccatcagtgggcggtgcctacgtcgtgaagagcggggattcgctgttctccatcgcaaagaagcacaatgtccctgtcgaccagttgaaggcggcaaacggcctgaccagtggcgccattcgcgtcgggcagtcgctcgttattccgtctgctgccgcaggtgcgccgacacaggtggccgcaatcacgccgcagccggcaaacccggccaaagcagccagtgcgccggccaatggaggtgcagaggtaaagccttatacgccgccgcaggccagcaacaaggtaatcgaggatgcggaaaaggatcaggccgcagcgccatcctcaaccggcatctcgcagatgcgttggccggttcgtgggcgcattctggcaagcttcggccagcgtgagggcacctcggtcagcgacggtatcgatatcatggtgccggaaggcacgccggtcaaagccgccgaaaacggtgttgtgatctatgcgggcgatggtttgaaggaatttggccagaccgttctgatccgccacgacaatggccttgtgaccgtctatggccataacagccagataatggtgcagcgcggccagaaggttcgccgtggcgaggaaatcgccaagtcgggcatgagcggcaacgccaagtcgccgaagctgcacttcgaggtgcgcaagaactcggcgccggtcaatccgaccaaatatctggaatcataa

SEQ ID NO: 485 - DNA, 924 bp, Brucella melitensis
atgttcaagctgaaacttctgctcttccgctggtcgcgcaagctgaagcaattcaattactggctctgggcacaagccgtttttgtgctgctcgggtttctgcgcctgtttccggcaaaagcggcaatcagcttttcggccagggtggctcgtcttatcgggccgctgacgccgcgtcataaggtggccaccgacaatctgcgcaaggcctatccggaaaagagcgaagctgaaatcgtgaagatcgcccgcgaaatgtgggattcgatggcgcggcttttcgcggaatatatcttcctcgatgcggttttcgatttcgatccctatgccgtaaaaccggggctggtcgaggtggaaggcattccgattttcgagggcctgcgcgacgaaaagaagccgcatatcttctttaccgcccataccggcaatttcgagcttctgccgatctgcgccgccactttcggcctcaatgtcacggcgctgtttcgcccgcccaacaatccctatatcgccaacaaggttttgaaggcgcgccgcacgaatatgggtcatctggtgccatcgaaggccggtgcggcatgggcgcttgcgggaatcctcggcgatggcggcaatgtcggcatgctggtggaccagaaattttcgcgcggcgttccctccacattcttcaatcgcccggtgaagaccaatccgctgctcgccaagctggcacggcaatatgattgcgatgtctatcccgcgcgctgcatccgcctgcccggcgggcgttatcgtctggaactctatgagcgcatggaattgccgcgcgacgaatccggccagatcgacattaacgcaaccacgcaattgctcaacgacaccgtggagcaatgggtgcgcgaatatcccggccaatggatgtggttccacaagcgctgggggtag

SEQ ID NO: 486 - DNA, 270 bp, Brucella melitensis
atgtctctcttttccggcattgcgatctatttcatcatctggtggacagcactttttgcgctgctgccttttggtttgcgcacgcaggccgaggaaaacgaggtgacacttggaaccgtcgccagtgctccagccaagccgcatatcgggcgcgctttcttgcgcaccaccgttgccgccacgcttatcttcctgctctattattatctgacgcaggtaagcggtctcggactggacgatattccccatttcttccccgatctgacataa

SEQ ID NO: 487 - DNA, 402 bp, Brucella melitensis
atgaaaaagctgtttattttggccgctgggatgatgctggctggctgcattactgatgctggaaaactggaagatcggattgccgctcaaagagcgccttcaccggccataaagcaactcatcatcaatgaggcgcggaatatcctgctcgatccatattcggtccgcgatgtctcgatttcatcccttattccgaatctgaaaagctccaataatgatgggttcatatgcgtccgcttcaatgcaaagaatagctatggcgcttatacgggtctaaaaacggtcggaacaaacgtcattagtgggcggctacttggatattttaccaatccagccatatgcgcatatcctaccgtgaagtggcaccccttgccggaagtttcgcaactgcgcaaactgtga

SEQ ID NO: 488 - DNA, 453 bp, Brucella melitensis
ttggcgccacccacacagtggctcctctttatttgccgtcactgccaaggagtacataaacagatgcagcttaaatccattcttctggcactcggcattggtgcggcgggattaacgctcagcggttgcgtatcggaaagctattacggcaccagcggcggatattatgatccctattatgtgcgcggcggctatgtcggcagcgccatcatctatgatagcgggcgttatcgcgctcctcgccgttaccacagttatcgccataatcatcgcccgaaccgcccagattataacaggcctcaccgcccgaaccggcccgattacaatcggccaaatcgcccggaccggcccggcaggccggatcggccgcatgtgcgccccggtgacggcagctccagcggcagtggcaatcacaggccaagaatccacgcccccgaacgcggcccgcgctga

SEQ ID NO: 489 - DNA, 699 bp, Brucella melitensis
ttggcgctgggcgccattctggctcttggcgcattcagcctgtggtccactgcgcagcacaaaagcccacaagcggctttatccgcgctattccagcgtcccgcgcccaagcccgccccggcagctacagccaaggctgaaaacaagcccgcgcccggcaagactgccgatacgaaagcgccagccagagattatgcggccgccgttggccctgttccccgcccggcagcaccggttgcgcccacaccgcaaaagcccgtccagaccgcggccgtcgcggcgcccaaaccgccccgcccttccgggagcgtcgtggcatcggttacacccgctgcacctcacgccatgccaccacgcggcgtcaatacaccggcaaactcgccgtcggttatctatgccaaggccaagctcaccattcacaagaatgcctgggaccgttcgccagccattgccaccattgagaaaggccgcgaaatgcgctcctacggcaagacaggccgctggcatcgtgtggttgtaccctcgacgaacatcatcggctgggttcacgaggatcaattgatcggtggacacaacaagccggacagcgcaacgctcattaccggatcagttgccaaaaaggcgccatcgcccgcgtccacgcccgctcatgtgcaatcacacatcctgccgccaaaggctgtcggcgctaaaaactag

SEQ ID NO: 490 - DNA, 954 bp, Brucella melitensis
atgtttgcaagacctcttatcgcctccatgctaggcgctgccgtttgcttgacggcgcttggaacggttgcggctccagctttcgccgcaggagaatccgaggtcaaagtcatcgtgtccggcaatgctattaccaatagcgacatcaagcaccgcatggccttcctcaagcttcagcgtaaaagcggcaatctcaaccagcttgcgcgcaacgagcttaccgaagaaatgctcaagcgcatcgagatgaaatcgcttggcatcaatatttccgataaggaagtgaatgacgcctatgccgggtttgcaagccgcaacaagatgacgctggcgcagctcaatcaggttatgaaccagtcgggcgtcacgccggaacatttcaagaaatatatcatggtccagatgggctggggccgccttgtcagcgcccgcttccgcgcgaccggcatggtcagtgagcaggaagccgtgcagcgtatgctgaagaacggcggaaagaagcccgttgcaactgaatatcatctccagcaggtgattttcgtggtccccgcctccaagcgttcgcccgctcttctggcaaaacgccgtcaggaagccaatgcgttgcgcgcgcgcttccagaattgtgacagcacgcgccagcaagccaagggcattctcgatgtgaccgtccgcgatcttggccgtatcatcgagccgcaattgcccggcgaatggtccaaggatgtgaaggccgctggcgtcaaccggacgaccaagccgcacgatacggaaaagggtgttgaattcctggccgtatgctccacccgtcaggtgtcggatgaccgcgttgcacagcttgtcttctccatggaaggcgcggattcccctgcggggcaggaaaagaaggctgaggaactcagcaagaaatacgtgcaggaactgcgcgaaaaggccaccatcgtcaatcgttga

SEQ ID NO: 491 - DNA, 1542 bp, Brucella melitensis
atgtccagagccaggatttccaactatcgcaaaggcgttgccgccgtcgcgctttccgcagcgcttgccggcgcattcgtcgtaaccggcccgcttggtgcgctgaacgaagcccgcgccgaagcggtgcatgtgacgccgccgcagcaggctggctttgccgatctggtggaaaaggttcgccctgcggtcgtcagcgtccgcgtcaagaaggacgtgcaggagacttccaaccgtggtccgcagttcttcggccctcccggcttcgaccagttgccggacggtcatccgctgaagcgatttttccgtgattttggtatggagccgcgtggcgattcacgctccgataaccgtcgcggcaaggccaacaagccgcgcccgggccatgaacgccctgttgcacaaggatcgggcttcgtcatttccgaagatggctatgtcgttactaacaaccatgtcgtttccgatggcgatgcctataccgtcgtgctggacgacggcaccgaacttgatgccaagctgattggtgctgatccgcgcacggacctggccgtgttgaaaatcaacgctccgaagcgcaagttcgtctatgtcgcctttggcgacgataataaggtgcgcgtcggtgattgggttgtcgcagttggcaatccgttcggccttggtggcacggtgacttccggtatcgtttcggcccgtggccgagacatcggcgcaggcccctatgacgatttcatccagattgatgccgccgtgaacaagggcaattccggtggtccggctttcgacctttccggcgaagtcatcggcatcaacaccgccatcttctcgccatctggcggcagcgtgggcattgcttttgcaattccgtcctccaccgccaagcaggtcgtggaccagctcatcaagaagggttccgtcgagcgcggctggatcggcgtccagatacagcctgtgaccaaggatatcgccgcttcgctcggtcttgccgaggaaaagggtgcgatcgtggcctcgccgcaggatgatggcccggctgccaaggctggcatcaaggcgggcgatgtgattacggctgtcaatggcgaaacggttcaggacccgcgtgacctggcgcgcaaggttgccaatatcgcccctggtgaaaaggcggccctgaccgtctggcgcaagaacaaggccgaggaaatcaacgtcacgattgctgccatgcccaatgacaaggggaagagcggcagccagtccaacgacaatgacggcggacagggtgaaacgctcgactcctacggcttgaccgtcgttccgtctgaagacggtaagggcgtggtcgttaccgatgtggacccggacagcgatgcggctgaccgtggcatccgctccggcgatgtgatcgtgagcgtcaacaaccagacggtaaagaccgctggcgatatcaacaaggccatcacggcagccgaaaagtcaggccgtaaggcggtgctgctgcaattgcagagcaatgatcagagccgcttcgtggcgctgccgatcaatcaggaatga

SEQ ID NO: 492 - DNA, 1140 bp, Brucella melitensis
atggaattctggcttgtagcagcacttttaaccttcgcagccacgctggctgtcctgttgccgctgacgcggcgcaggcaagccgctttgcccgccgaaaaaaacgaccttgaggtctatcgcgaccagcttcgcgaagttgaggccgacgttgcgcgcgggatgatcgatctgcaaagtgctcaacaggcgcgcatcgaaatctcccgccgcatcctcaatgccgaaaaggatgccatggccgcaacggctgatggcgggcagggccgttccggccgtgtgctggcgtttgttgcagttctcgccgtgccgctggtcgcctggggcatctatccgctgtttggtgcgcccgacatgccctccatgccgctcgcgccacggcttgcagccgcaccggatcgcagttccgtcaccgacctcattgcccgcgctgaagcgcatctggcacagaatccgggtgatgtgcggggttgggatgtgctggcgccgatctatctgcggcttgggcgggcttccgacgcggtcagcgcctatcacacatccatccggatcgctggcgaaaaccttgcacgaattcttggactgggcgaggctttgacggctgcttccggtggcacggttacggccgaggccgagaagctgttcaagaaagcagccgaactcagccccgatgatattcgtccgcaatattatcttgcgcagggcgaaatgcaggatggccatccggatcgtgccgctgaccgccttcaggcctttctggacaaagctccggcggatgcaccttggcgcggccagcttgagaaaaccattgccatccttcgtgatcccgcgagcgccaaacaggcggaggcgaaaggtccgagcgccgaagatgtcgaagcggcttccacgctcagcgccggagatcggcaggcgatggtggaaggcatggttcaacgcctcgatgaaacacttcgccagaatggcggggatatcgatggctggaagcggctggtccgctcctatatgatcctcaaccgccgcaacgatgcgcaggatgcgctggctcgcggcatgaaggctcttcagggtgaaaaccggaccgaacttcaaagcttcgccaccacacttggactggacgtggggactgcacaagaatga

SEQ ID NO: 493 - DNA, 927 bp, Brucella melitensis
ttgacggcgggcgcgctggcttttgccggtgcagcaagcgcacaggataagaaagtgacgatcggcgtgtcgatcccggctgccgaccatggctggacggcaggcgtcgtctatcacgccgagcgtgtggcgaagcttctgatggaggagcatccgggcctcaacgtcatcgtcaagacgtcgcccgatgccgcatcgcaggccaatgctttgcaggatctggcagtgcaagggttggatggcctcgttgtcctgccgactgatcccgatccgctggtcaacgccatcaaggagatcaaggacaaggggaccttcgtcgctctggtagaccgcgcgccgagcaacaacgacaataccatccgcgatctttacgtggctggtaacaagcccgcactggggcaggtggccggtgaatatatcaaggccacgaccccggatgcacaggtcgtcgtcattcgcggcctgccaatcccgatcgatcagcagcgccaggacggtttcgataagggtatcgagggctccaatgtcaaggtgcttgaccgccaatatggtaactggaaccgcgacgatgccttccgcgtgatgcaggacttcctgaccaaatatccgaagattgatgtggtctgggcgcaggatgacgacatgctggttggcgttctcgaagctatcaagcagtccaatcgctccgacattcaatatgtcgtgggcggcgccgggtccaaggatatgattaagcgcgtcatggatggcgacaagcttgtgccggttgatgtgctttatccgccagcgatggtttcaaccgcaatggaactcgccgccggtcatttctatgaccagattccggtcagcggcgactatatcctcgacgcaacgctcgtcaccgaggataatgccaaagatttctatttcccagattctccattctga

SEQ ID NO: 494 - DNA, 2793 bp, Brucella melitensis
ttgtcgcggcccgacttttttggttggccctcggcttctgatcgcataagcaacgcaagcaggttcagggagtgcttgcagcaattgcaggtctttcgggaaccttgtcctgtgtcaagggaggccggaatggcaaagtgggtgtacacgttcggtgatggcaaggcggaaggggctgcgagcgatcgcaaccttctcggcggcaagggggcgaacctggctgaaatgagcagccttggcctgcctgtgccgcccggctttacgattaccaccgaagtttgcacttattattacaataacgaccgcgtctatccgtccgaactggatgcgcaggttcaggcggcgcttgcgcatattgcaacgcttaccggtcgtaatttcggtgatgcggaaaaaccgcttctggtttcggtgcgctccggcgcgcgcgcatccatgccgggcatgatggatacggttctcaatctcgggctcaatgacgagacggtgcaggccattgcccgcgaatcgggcgacgaacgtttcgcctatgacagctatcgccgctttatccagatgtattcggatgtggtcctgggtgtcgatcatggcttcttcgaggaaattctcgaagataccaaggcggatctcggtgtcgaggtcgatacggcgctttccgccgacgactggaagaacgtgatcgggctttacaaggcaaaggtcgaggaagaactgggccagcctttcccgcaagacccgcgcgagcagctttggggcgcaatcggcgccgttttctcaagctggatgaacgcacgcgccatcacctatcgccgcctgcacaacatcccggccgcatggggcacggcagtcaatgtacaggccatggtcttcggcaatatgggggaaacctcggctacgggcgttgccttcacgcgcaacccatcgacaggcgaaaacaagctctatggcgaattcctcgtcaatgcccagggcgaagacgtggtggccggtatccgtacgccgcaaaacatcaccgaggaagcgcgcatcgccgccggttccgacaagccctcgcttgaaaaggtgatgccggaagcctttgccgaatttttgaaagttgcaaatcgtctggaacagcattatcgcgacatgcaggatctggaatttaccatcgagcgcggcaagctgtggatgctccagacgcgctccggcaagcgcactgcgagggctgcgctgaaaatggccgtggaaatggcggcggaagggctgattagcgaggaagaggcggtgttgcgtatcgaccccgcagcccttgaccagcttctgcatcccaccatcgatccgcgcgccgagcgtcaggtcgtgggcatgggcctgccagcttcgccgggcgctgcaactggcgagatcgtgttcagctccgaagaggccgaacaggccaaggcggaaggccgcaacgttattctggtccgcattgaaacgagccccgaagatattcacggcatgcacgctgccgaaggcattttgaccacgcgcggcggcatgaccagccatgcggcggtggttgcgcgcggcatgggcaagccctgtgtttccggcgccggttcgctgcgcgtcgattaccgcaatggcaccatgctggctgctggccagaccttcaggaagggcgatgtcatcacgattgatggcgcaagcggccaggtgctgaaaggctctgtcgccatgttgcagccggagctttccggcgatttcggcaagctgatggaatgggccgaccgtgcgcgccgcatgaaggtgcgcgccaatgccgaaacaccagccgatgcccgcactgcgcgctcatttggtgcggaaggcatcggcctttgccgcacggagcatatgttcttcgatggcagtcgcatcgtcgccatgcgcgagatgattttgtccgataccgaggaaggtcggcggctggcgcttggcaagcttctgccgatgcagcgttcggattttgccgaactgttcgagatcatgaagggcctgcccgtcacgatccgcctgctcgatccgccgctgcatgaattcctgccgcatacggatgaggaagtggacgaagtcgcccggtccatgggcgtcgatgctgcgaagctgcgcgaccgcgccgatgcgctgcatgagttcaatccgatgcttggccatcgcggttgccgtctggctgtttcctatccggaaatagccgaaatgcaggcgcgcgctattttcgaagctgccgtggaagcgggcaagaagaccggcgagccggtggtgccggaagtgatggtgccgctggtgagcttgaaggcggagcttgatttcgtcaaggcgcgcatcgatgcggtggcgaaggaagtcatgagcgaggcaggcatcaagatcgactatatggtcggcacgatgatcgagctgccgcgcgcggcactccgcgcggccgagattgccgaatctgcggaattcttctccttcggcaccaacgacctgacgcagacgaccttcggtatttcgcgcgatgatgccgccggcttcctcacgacataccagaaccgcgttgtgatcgagcaggatccgttcgtttcgctcgacgtggacggtgtgggcgaactggtgcagatcgctgccgaacgcggacgcaagacgcgcgaaaagatcaagcttggcatctgcggtgaacatggcggcgacccggcttccatcgccttctgcgaaaagacgggtctcgactatgtgtcctgctcgcctttccgtgtgccgatcgcccgccttgcggcggcgcaggcagccgtgcgcaaagtgtaa

SEQ ID NO: 495 - DNA, 3465 bp, Brucella melitensis
ttgctgatgcgcttctccaggctgcgccttgtcgggttcaaatccttcgtcgagccgatggagttcgtcatcgaaggcgggcttacaggcgttgtcggccccaatgggtgcggcaagtccaatctggtggaagccctgcgctgggtaatgggtgaaaactcctacaagaacatgcgcgcttccggtatggacgatgtgattttttccggttccgcgacgcggcccgcgcgcaatacggcggaagtgacgctttttctcgacaattccgaccgtacggccccacccgcctataacgacgcggatgaattgcaggtgtcgcgccgcatcgagcgtgaggccgggtcgctctaccgcatcaatggcaaggaagcacgcgccaaggatgtgcagcttttatttgccgatcaatccaccggtgcgcgctcgccttccatggtggggcaggggcatatcggcgagttgatacaggcaaaaccgcaggcgcgccgtgcgcttctggaagaggcggcgggcatttccggcctgcacacgcgccgccatgaggcggaactgcggctgcgcgcggctgaaaccaatctggagcggctggatgatgtggtgggcgaactgggcagccagattgaaagcctgaaacgccaggcacgccaggccaatcgcttcaaatcgctttccgcagatatccgccgcgccgaagcagccttgttgcacctgcgctggaatgtggccaaagggcaggaggccgaggcgcagagcgcgctgtcgcaggcgaccgcgaccgttggcgatatggccgaagcgcagatgaaagccgcgcgcgatcaggctgtcggcgcgcataaattgccggaattgcgtgaggcggaggccggggctgccgcagccttgcagcgtctttccattgcgcgcacgcaactggacgaggagggtgagcgcattcgcgcccgccgtgccgaactgatgaagcggctggagcaactgactgcggatatcgcgcgcgaagaacagatgttgcgcgaaaatgccgatattctggcccggcttgatgaggaggagcaggaactggccgcttccagcgaggcatccggtgaacgcaatgaggaattgcgcgcgctgttcgaggaagcggaaatccgcttgcaggatagcgaaagcgcgcttgcccgcttgacggcggagcgggcggaagccgctgccgagcgcgcgcaggtcgagcgggcgctgaaggaagcgcaggaccggcgtgaccgtctggccgtgcagatggaaaatatcgagcgcgatatcgcagccgtggttggacagatcggcggtctgttcgatccggcggaaaagcgcatcgtggtggatgcctgtacgcaagccctggaagcggccgaagaagcggttgtcgcggcggaagaactggtcgcccatgcgcgcgaggcggaagccgcaagccgccagcccttgagcgaagcgcgcacggaattgaaccgtatcgaaaccgaggcacagacgctggcgcgcattctcaatgcgggcgagacaggccaattcccgccggtcgtcgaggaattgcgcgtcgaaaagggctatgaagtggcgcttggcgcggctttgggcgaagatctcgatgcggcaagcgatgagaatgcgccggtttactgggcctataatcccgctgccgaaaccgatccggccttgccggaaggggccatgccgctcgatcgcctggtggatggcccacagcaattgcgccgcaggctggcacaggtgggcgtggtttcggaagcggacggcaggcgtttgcaggtaggcctgagaccggggcaaaggcttgtgagcaagacaggcgcgctctggcgctgggacggctatacggcgagcgccgatgcgcctacgcctgccgcgcagcgtctggcgcagaagaaccggcttgccgaactggaacaggatgcaatcggcgcgcgcaggcgcgtggaagatgccgggcaggcggtggaacgcgcggaagcggcagtgcgcaaggccgttgaggacgagcgcgtggcgcgcgatcaatggcgtgccaaccagcgcaagctggatgaggcgcgtgaagcactggccgcagccgagcgcgcggcaggtgagcttgcaacgcgccgctccgcgctggatgaatccagggcgcgtctggaagaaaatcttgaagaagcgcagatccgtgttgcggaagccggggatcgccttggcgaaatgccggatatggacgcgattgcccagcgcctttcggcgctgacgagtgaggtgcagtccgaccgcgcggcgcttgccgaggcgcgggccgcctatgaaggacttcgccgcgaggccgatgcgcggttgcgccgccttgaaatgattgcactggaacgccgcaactggatttctcgtgccgaaaatgccgatcgccagatcgctgcattgaacgaccgccgggcggaaaccgccgaagaagccgaggtgttagcggaagcgcctgacgaaatcgaaaaccgccgccgggcacttttaaacgagctttcgctggcggaagagcgtcgcagggcggcggcggatattctggcggaagcggaaacccggcaggcggaactcgacaaggcggccacgcttgcgatccagcatcttgccgcaagccgcgagcagcgcgcgcgcgccgaagaacggctgaccgcagcgcaggagcgccgcaaggatgccgaagcgcgtatttttgaagccttaaactgtccgccgcatgaagcgatccgccatgccggtctgaagccggaagacgccatgccggacccggaccagcttgagcgccagttggaacggctgaagatcgagcgcgagcgtctgggcgcggtgaacctgcgcgcggaggaggagagccgggagctttcggaccgtctcgacgcgcttatctccgagcgtgaggatgtgattgaggcgatcaagaagctgcgtcaggcaatccagagcctgaaccgcgaaggacgcgaacgtttgctggcggcattcgatgtggtgaatgcgcagttccagcgcctgttcacgcatctgttcggtggcggtacggcggaactgcaactgatcgaaagcgatgatccgctggaagccgggcttgaaattcttgcccgcccgcccggcaagaagccgcagacgatgacgctgctttccggcggtgagcaggcattgaccgccatggcgttgatttttgcggtcttccttaccaatcccgcgccgatctgcgtgctggacgaagtggacgcgccgctcgacgaccataatgtcgaacgctattgcaacctgatggacgaaatggcggcttcgaccgaaacgcgcttcgtcgtcatcacacataatccgatcaccatggcgcgcatgaaccgcctgttcggtgtgaccatgggtgagcaaggggtgagccagcttgtctcggtcgatcttcaaacggcggagcagctacgcgaggcaagttga

SEQ ID NO: 496 - DNA, 1239 bp, Brucella melitensis
gtgaattcagaggagaaacccggaaccaatcctgctgaacagcagtccgtatccgagcctcagaacgaggctgtgccaaccgcgccggaaaaggctgcggaacctaagccttttgtgccgaaatccgcttccgaagccttgcgcccggaacccggcacaccgccgccccgcaatcgctcgcgccatgcgcgcagccagatcgtcgttttcatgaacttcatgctgtcgcttgtcgtgctggttttgcttggcgcgtcggcattgttctatttcggcaaattacagtttgatgcgcagggcccgctcacggcggaaacgacctttctcgtcaagcgcggcgctggcattgccgaagtgagcaacggtcttgaaagccgcgatatcgtcagcgatgcgcgcattttccgctatggcatgcgcacgctcgggcatgaaaacgacctgaaggcgggcgaatatgccattcccgtcggggcgtcgatgcgcgacgtgatgaacatcctcatcagcggcaaatccatcatgtatcccttcaccgtgccggaaggcctgacggtcaagcaggtgttcgaccgcatcgccgccgacccgatcctcattggcgacatgccgaaggaaatgccgccggaaggctcgctcttcaccgatacgctgaatttcacccgcggcaccacgcgttccgagataattgaccgcatgatcgcctcgcagaagaaactggtggacgacctttgggcaaagcgcaggcctgacctgccggttcgggacaagaacgaatttgtgacgcttgcctccatcgtggagaaggaaaccggcattgcttccgagcgtccgcatgtggcttcggtcttcgtcaaccgtctgaacaaggggatgcgtctccagtcggacccgacgatcatctatgggcttttcggcggcgcaggcaaaccgtcagaccgcccgatattcaagtcggatatcgagaagcccacgccttacaacacctatatcatcaatggtttgccgccgacacctattgccaatccgggcaaggcggcgcttgcggcggtcgccaatccgctccagaccgacgacctctattttgttgcggacggcacgggcggccatgtattctcggcgaccctgaaggggcacaatgacaatgtgcgcaagtggcgggccgcagaacagcaaaagaatatcgggcagcagaaagatacatccggcggctccggcaaacccgataccgggcagtag

SEQ ID NO: 497 - DNA, 375 bp, Brucella melitensis
ttggcacaggaaaacgggcgctaccggctggaaggcacggaaaccggctatgtgcggctcgatacacaaaccggcgcaatctcggtgtgcacgcagcagaagggccagttggtctgcaagatggctgccgaagaccgcgatgcttatgagaacgacattgccgatttgcaagcgcgcgtgaagaagcttgaagcgcaggtcgcagccatgggcaaggtggagggcagcaaggcgtccgccctgccgtccgaacaggaattcgagcaatccatgagctatatggagcgtttcatgcgccgcttcatggatctggctaaaagctttgaaagcggagaggaaaagcctgctccccccacaataccggggcggacctga

SEQ ID NO: 498 - DNA, 1152 bp, Brucella melitensis
atgaaatcctggaagcagattgctctgtgcctgctcatcattctcgccgccacaggtggctggtatgtttataagaacaacaatggcgcggcgcaattggccctatcttctggagatgcgcccggcaatgtgtctcaggctcagcccaaaaaacagccgaagaaccatgcagccccccttgtcgtggtggcggcggccggcgaagaaaccatcaataatcgcctgaccgccatcggttcggcgcgggccctgagcacggtttccgtgacgccctattccagcggctacatgaccaagctccatgtcagggcgggcgatacggtgaaggaaggcgatctgattgccgaactggacgccgaaaccgagcagattgccgttgccaaggccgaaacggcgctgaaggatgcacaaaccacccgccagcgcattgcacggctgcgtgcaaccaacacggcgaccgaagtgcaggccgtgggggccgaacttgctgtcgccaatgcgcagcttgcgcttcaggatgcccaacttgcgctgagccgccgcatggtgcgcgcgccgatcaccggcattgtcggtattcttccggtcaatgccggcaattacgtcacggcacagacttccatcgcacgcatcgatgaccgctcgaccgttctgatcgatatctgggtgccggaacgtttcgcaccgcagatcaaggtcggacagccgctcaccgcagaatccaccgctttccccggcgagatttataagggccggatcaatgccgtggacaatatgctggatgaggcaagccgcaccctgcatgttcgtgccgaagtgccaaatgccgaggaccgcctgcgtgcgggcatgtccttttcagtgaccattctcttccccggcgataactatccctcggtcgatccgctggcgatccagtggggggctgacggctcctatgtctggcgcatcgaaaacggaattgcgaagaaaatacccgtccgtatcgtgcagcgcagttccgacaatattttgatagacggcccggtgaagcggggcgacatgattgtcacgcagggcgtacagaccgtgcgcgacgatgcgccggtgcgcgtgaagggcgagcagggcgtcagcgctcttgcccccgccgcaatgcatgacgaagggtga

SEQ ID NO: 499 - DNA, 1917 bp, Brucella melitensis
atgagcgccctcgctggcaacatcaagcaggcgcgtgctgacaatgccgaaaaggctggcattgagggcgctgcaaagaaatttgctgggcttgaccttgggagcctcctgagcggtggcgcggcttatccatcggctgttgctggcggtgcttctcccacgagcggagcagcgaccggtacaacgcccactacaggcgctacggttgatctttctggcgataaacagaaattcattgatacgcttttgccagcagcaattgaacatgggcagcgcatcggtgttgatccgcgtatcatagttgcgcaggccgcacaggaaactggctgggggcgctctgcgcctggcaacaatttctttggcatcaaaagccacggtcagggcggcggccagaaccttacaacgcatgaggtaatcaatggtcagcgcgtgaagatcaacgatagtttccgcacttttgccagtccgcaggatagcgttgccggttatgctgatttcatcgccagcaacaagcgctataggcctatgcgggaagcgcagggattggacgcacaattgcaggcgcttggcgcgtcaggctatgctactgacccaaattacgcgcgctcagtcggtgctattgcccgatccatcaatttacctcagcaggcacagccacagggcgtgcaggttgcaagccttgatccatctatcggaatggctcaggcttatgcgccagaaccgcagccgcagaccgcagcggcagcaatcaaccagattgcaccacagcagccggtgcccgaagccaagatcagtgatgctctcttgcgacagaatgatatggcacttggcggtgcgctcgctccgcaggggcaggctccacagcaagttgctgacacatcgggctatttcccggctgcaccgtcagcagatagcgccccgatcatggggagctatgcagcgccacgccagggaggcgtgaatatccagcggttgcttgaggctgcatccgatccatggatgaatgacgcacagcgttccgtcatcggcatggccttacagcagcagatgcagcagaatgacccgatgcgggctttgcaggctcaaaagctgcaactcgaaatggacgctctgcgcgccaagccacagactgaatatggctttacgacactaccagatgggacggttttgcgcacggataagcgttccggcaatgcagagccgatctatagcgcgggccagaaaccaacgagtgacatgcaggaatacaattttgctgtgagccaaggtttcaagggcagtttcgctgattatcagcaggcgatgaaaaaggctggcgcgagcagcactaacgtttccgtgggcgagggcgataagttctatgaggctctggacaagaaaaatgcggacacgttcgccgcgctctcggacgcagggatacaggcacgttccaagctggcccagattgaacgccttggcgggcttatgcaggcttcaccgaccggcgcgacagctgtgctgaaacttgccgccggtgaatatgggatcaagacagacggtctcgatgatttgcaggctgcacaagctttgatcaatgagcttgttccgcagcagcggcaaccgggctccggtcctatgtccgatgctgacttggcgctgttcaagcaatctctgccccggattattaatacgcctgacggcaaccaacttattctcgacacgatgcgcggcatcacccagtaccaaattcagatgggtgatattgcagatcaggttgccaatcgggaaatctcggcggcagagggccgaaattggatcaaaaacctgaagaacccgctcgaaggcttccgcacatccacaaaggataaaactcccggaaagagcggagtttcgggaaataggcttcgtttcaacccgcagactggtgatttcgaatga

SEQ ID NO: 500 - DNA, 690 bp, Brucella melitensis
gtgaagacgccaaaaggaaaaggcaaaaagccatcaggcggcaaacaggagcgcggcttcgagcgcaggaagcaggatgcgccgcgcacggaaaacaagtttgaaagcaggaccgaaggcaagggcgccttcaagaagccgcgcccgcaattcgccaaggctgcgccgaaaccggctgaggaaaaggcgcccggaccgcttcgcgaaatcaggccctatacgggcccgcgcccggccgagcgcctgccgctcattcttgaaaccgagccttcgcccgattatgcgctgctggacagcggcaacgggctgaagcttgaacaatatggcccctatcgcatcgtccgcccggaggggcaggcaatctggctgccagccctgccgcaaagggaatgggatcaggccgacgctatcttcaccggcaatacggatgaagaaggcatggggcgctgggcgttcccgaaaacgccgctcggcgaaacatggccgatgcagcatgatggtatttccttccatggccgcttcacttccttccgccatgtgggggtttttcccgaacaggctgcgcactggtcgttcatggacgggctcatccgcgatgcggtgaaaacgggagcacggtcaaggtgctcaatcttttcggctatacgggcgtggcttcactcgttgccgcacgcgctggcgcggaagtaa

SEQ ID NO: 501 - DNA, 738 bp, Brucella melitensis
atgataagatcagtcttggagcataatccgaccgcagcgaaacgagggcgatcaagattatgctttggaaagaaaagcttggagcgccgatctgtttcaatccgattgaaacgcgcgctcaagcgtcttgtcggcccggcttcagctttcctggccctggctttttcgcatggcagcgttgatgctgccatgcgaaaaaataaacagccacccgcgccaccctccgtttacacccaaactccaggatttgccgtcaaatctacagaaatcatggtgcccgatggggtctctgcgggggaatatcggcgcatcacccacccttttcccaactggacattggtgtgtgacgagaatttgaaggcgaaaaagcgtgtctgcaatatcacgcagacaatcatgcatgaaaaagggttggtcgtattcagctgctcgttggcggctgcggagaatggcaagccgtatatgatcatgcgcatacccgcagttgtgggggcaaggcaggaaatccgcctggatttcggtgatggaactccgatcatcgtgagtaaaacgcatggttgcgagggggcggtctgtatcgcctatctgccggttggcccacgtctgcgtgtatatattgccaagggcagcgtaccgaaggtctcttatcccgtaccggatatacgtcgcggttcggctgattggttaatgttttatgcgccgctctctggccttgcccacgcgcttgctgcaatctga

SEQ ID NO: 502 - DNA, 924 bp, Brucella melitensis
atgaaatctgtgactttcaagaacaagaactgggatatcgctgcctatttgcacacccctgccggtttcgacgaagcgaagaaatatcctgctattgtcgtggcccatcccatcagctcctgcaaggagcagacagcggcgatttatgccgcaaagctggctgaacttggctatgttgcattggcattcgacgcttcgacacaagggacaagcggtggcctcggcaaatatctggaagacctcgcaagccgggttgaggatttccgctgtgcggcggattatctcgtgacgcttgatttcgtggatgagaacaggattggcgtgctgggtatctgcggctgcggcggttacgctgtgaacgctgccatgacggaccgccgcttcaaggtggtcagtacggttgtaggtgcaaattacgggcgtcttttgcgtgaaggcgatatgtcgccggatgcggcaatcaaggccatggaagcgataagccagcagcggactgccgaagcgcgtggtggcgaggttgcaataacgtcctatattccccaatcggtcgatgcgttgaaggcttccggcatcaccgatatcgatgtgaccgaggctgtcgattattacacgaccccgcgcggccagaagccgggatcacccaacaagctcaatgtgacgagcacgggagcagccttcaactgggatgcatttcaccttgcagatcagcttttgacccagccgctgcaaattattatcggtggcggacagccgggcattttcggttcgttccgggatggttatgaattgttcgacaaggcccgttcgcaaacgaaaaacctcttcattgttcccggagccacacattacgacctttacgacaagccggaatatgtggatcaggctgtggcgcggctgaaggaattctatagcgaatatctttga

SEQ ID NO: 503 - DNA, 969 bp, Brucella melitensis
gtgttcgcgctttgcgcttccgccggtatcgccagcgcccattgctcgctcgaccagaaggaagccaaggcaggcaccttctacaaggccgcactgcgcattccgcatggctgtgaaggcaaggccacgaccaaggtgactgtagacctgcctgaaggcttcatcatggcacaaccgcaagccaaggctggctggaaaatcgagaccacgaagggcgactatgcccatggctacaagctacacggcaaggaagtaacctccggcgtcaagcagataagctggagcgacggcaacctgccgagcgatttctatgacgaattcgtcgttgtgggccagcttgcgccattcgacaaggacacaaccctttccttccccgtgacgcagttctgcggcgatgcggcttcggtcgcgtggaccgaaatcgccaaggatggccagaacccgcacgatctgaagcatcctgcgccgcaacttcgcgttctggctgccgccagcactgatgaacatgcgggccacgacgccatgagcgaacacatgaaccatgccgccatgcccaccaaggtcggcgatctggtcattaccgacccgtccgtccgcgccatggtgccgggcgcaaaggttgcgggcggtttcctcaccatcgccaatgatggcaaaaaagccgacaagctggtgagcgtcagcgcccccggcgtcaagcgcgtggaaatccacgaaatgaccatgcaggaccagatcatgaagatgcgcaagctcgaaggtggtctggacctgcccgcaggcaagaccatgcaactgaagtcgggtagctaccacctgatgttcatcgagccggaacatccctacgaggaaggtgaaaccgttccggtaacgctggaatttaaaaaggctggcaaggtggagatcaacttccccgtgacggcgaagaagggccagaccaaggaccattcggagcattccagccactaa

SEQ ID NO: 504 - DNA, 1443 bp, Brucella melitensis
atgaccacacaatattactatgctaggaagactgcgcttatctctcaatcccggcgcgtgtccgcgccaaaatgtgactgtgaaaaatccatgtcccattccgcatgcccgaaaccagcaaccgcccgccattcgcaggcacttacgggcgaaatccgcattccgggcgataaatccatttcccaccgctccttcatgtttggtggccttgcatcgggtaaaacccgcatcaccggcctgcttgagggcgaagacgttatcaacaccgggcgtgccatgcaggccatgggtgccaggattcgcaaggaaggcgatgtctggatcatcaatggtgtcggcaatggctgcctgttgcagcccgaagcgccgcttgatttcggcaatgccggaaccggcgcgcgcctgaccatgggcctcgtcggcacgtatgatatgaagacgtcctttatcggcgatgcctcgctttccaagcgcccgatgggccgcgtgctgaacccgctgcgtgaaatgggtgttcaggttgaggccgccgaaggcgaccggatgccgctgacgctgattggcccaaggacggccaacccgatcgcctatcgcgtgccgatggcttccgcacaggtgaaatccgccgttctgctcgctggtcttaacaccccgggcgtcaccaccgtgatcgagccggtcatgacgcgcgatcatacggaaaagatgctgcaaggctttggcgcagacctgacggttgaaaccgataaggatggtgtgcgccatatccgtattgtcggccagggcaagcttaccggccagaccatcgacgtgccgggtgatccctcgtcaacggcttttccgctggtggccgcccttctggtcgaaggttcggacgtcaccatccgcaatgtgctgatgaacccgacccgcaccggcctgatcctgacgttgcaggaaatgggggcggatatcgagatcatcgatccacgccttgccggcggcgaggatgtcgccgatctgcgcgtcaaggcctcgaagctgaaaggcgttgtcgttccgccggaacgtgcgccttcgatgatcgatgaatatccggttctggccattgccgcgtcttttgcggaaggcgaaaccgtgatggacggtctcgatgaactgcgcgtcaaggaatcggatcgtctggcggccgttgcgcgcggccttgaagccaatggtgtcgattgtaccgaaggcgagatgtcgctgacggttcgtggccgccccggcggcaaggggctgggcggtggcacggttggaacccacctcgaccaccgcatcgcgatgagtttcctcgtcatgggccttgcatcggaaaagccggttacggtggatgacagcaccatgatcgccacctctttcccggaattcatgggcatgatggcggggctgggggcgaagattgccgaaagcggtgcagaatga

SEQ ID NO: 505 - DNA, 1107 bp, Brucella melitensis
atgaacctgaaacttctgtccagcgtggcttttgccgctaccatcggctttgccagcgccgcttacgcagacatcaccatcggtgtgattgcaccgctgacgggcccggttgccgctttcggcgatcaggtgaaaaagggcgcggaaaccgccgtggaagtcatcaacaaggctggcggcatcaagggtgagaaagtcgtcctgaagtttgccgacgatgcgggcgagccgaagcagggcgtttccgctgccaaccagatcgttggcgatggcatcaagtttgtcgtcggcctggttacgaccggcgttgccgtccccgtttccgacgttttgtctgaaaacggcgtcctcatggtcaccccgacggctaccggcccggacctgaccgcgcgcggcctggaaaacgtgttccgtacctgcggccgcgacggccagcaggctgaagtcatggctgattacgtcctgaaaaacatgaaggacaagaaggttgccgtgatccacgacaagggcgcttatggcaagggtcttgccgatgcgttcaaggcggccatcaacaagggcggcatcaccgaagtccattatgattcggtcacaccgggcgacaaggatttttccgcgctcgtcaccaagctgaagtctgccggtgctgaagtggtctatttcggcggctaccatgctgaaggcggtctcctgtcgcgccagctccacgatgctggcatgcaggccctggtgctcggcggcgaaggcctctccaacaccgaatattgggcaatcggcggcacaaacgcacagggtacgctcttcaccaacgccaaggatgccacgaagaacccggctgccaaggacgctatccaagccctgaaggcgaagaacatcccggctgaagctttcacgatgaacgcctatgcggctgtggaagtcatcaaggccggcatcgaacgcgccggttcgactgacgattccgctgccgtcgccaaggcgctgcatgacggcaagccgatcgaaaccgcaatcggcacgctgacctatagcgaaaccggcgaccttagctcgccaagctttgatatcttcaagtgggatgacggcaagatcgtcggtcttgaataa

SEQ ID NO: 506 - DNA, 1038 bp, Brucella melitensis
atgatttcctcgaccgcggcacttgccattgctgccgttctgtcggtttccgctgcccaggcgcgcgatcagatccagatcgctggttcctccacggttctgccttatgccaagatcgttgccgaaacttttggcgagacctatccgaacttcaagacgccggttgtcgaatcgggcggttcgggcgctggcatcaaggaattctgcaagggtgtaggtgaaaacaccatcgacattgccaatgcttcgcgcgccatgaaggattccgagctgaagtcctgcatcgatgctggcgtcaaggacgttcaggaagtgcgcttcggctatgacggcattgtcttcgccaccgacgccaagggcccggactggaagctgacgccggaagacatttataaggcgctggcggcaaggctggtcgttgacggcaagctggttgacaatcccaataccaagtggaaccaggtcaatccgaacctgccggattgggacatcgccgcctatattccgggcgaaaagcacggcacccgcgaagtgtttgaagaaaaggtcctggccgacggctgcaagcattccggcgctctggacgaaatcaggaagacgggccttgatgacaaggctgcggcttcggcctgcatcgcggtgcgcaaggatggcaaggcagtcgatatcgacggtgactatgctgaaacccttgcccgcattgcttccaacaagaccggcgttggcgtttttggtctctacttctttgaaaacaatgccgacaagctgaaggtcgcaaccgtcaacggcgtcaagccatcggctgaaactgtcgcctcgggtgaatatccggtttcgcgcccgctttatttctatgtgaagaaggcgcatctgggcgttattccgggcctcaaggaatatgtcgagttcttcctgaacgatcagatgatcggcccggatggcccgcttgccgaatatggtctggtcccggcgcccgatgcagaacgtgaagcacagcgtaccgccttcagcgaaggcaagacgcttgctgcaaaataa

SEQ ID NO: 507 - DNA, 651 bp, Brucella melitensis
gtgattatttttctccagctgaggaatgttcttggtcgtcgtaccggaaacgaaaagccgccgtttgatccttatgcttcggcccgcagttccgatgccgcgcctgctggcgggggacccgacaatgtggtttcactgccgcgccgcgcaaacgaaaaggattatacggccatcgacaagatagcgcccgcaggctcccccgtgaacgagggcctgcgcgctatctatgctgtcgaccccacctttgaaccggcccgtttcgttgatggtgtgaagatcgcctatgagatgatcgtcatgtcctttgccgacggggaccgcgaggttttgaagaaccttctctcaaaggacgtctatgagggcttcgtcgcagccatcgatgagcgagaaaagcggggcgaaaccgtgcgttcgtctttcgtgggcatcgacaaggccgggatcgcaggcgccgagatgaaggggtcggaagcccatgtcacggtcaatattgtgagccagatgatttcctccaccctcgacagggacggcaaggttattgatggcgacccggacaatgtggtcgagatcaaggatctgtggacattcgcgcgcgatacgaactcgcgtgatccgaactggaagcttgttgcaaccgaagcggaagattaa

SEQ ID NO: 508 - DNA, 1914 bp, Brucella melitensis
atgcgcgccagggcatccatatcggctggccttgccatagcggcggtcgccatggtggttttgccctcgcaggcttcggctgaaacccgctctctgaagctttactatgtccataccggcgagaaggccgagattgccttcaagaaggatggacgttttctgcctgatggcctgaagcgcctcaatgttttcctgcgcgactggcgccgcaacgaaccgaccaggatggatccgcgcctgttcgacctcatctggcaggtctatcagtccaccggctcgcgtgaatatatcactgtcgtttcagcctatcgttcgcccgcgaccaacgccatgctgcgttccagtacgcgcggcgttgccaagaagagccagcatatgcttggccgcgcgatggactatttcatccccggtgtcccgcttgccaagctgcgtgccatcggtatgcgttaccagatcggcggcgttggctattatccccggtccggctcgcctttcgtgcatatggatgtcggcaatgtgcgccactggccgcgcatgagccgccgcgaattgctggcgctgtttcctgacggcaagaccgttcacattcccaccgacggcaagccgctgcccggctatgagcaggcactggcgatgatcgaaaagcgcaaggctggtggcggaaccatcatgatggccagcaactcctcttcgcggaagcgcaaatcgctgtttgctgcgcttttcggcggcggcggtgccgacgaggaagaggataatggcgataccgcagcgcctgccacggcgcgcccggcgcgggcaaccgcgcccacgcggcaggccccggcagccgtgccggcggcgcctgtggaacagccgcgtgaaaccatggttgcagcccttcctgcccgcgatgctccggtgccgatgcaggcgccgcgtccggaaaccgggcttgatgcgcaggccgcagcggcggaaacgccggttgccgccttcaatgttcctgtgcctgcccacaagccgcaaatggccccgcaggatgccgtggcgctcgccgccgccgaagatccggctgctgctgcacgcgctgccgtggatgccaatacggcacaggttgccgatgcaggcatgtctgccgcattgacgaacggctttgtgcccgtcccctcggcccgtccgcatcttgaaacagataatgtgcagcttgccgccgccgttattccgactgcccgccctgaacgtcccggtgagcatccggcaagggggcaggatgcgattgcggccctcgtcaacagccagtccgatgagcctgcccagatggccggtgagatggctgacgcgacaggcaatgcggttgcgccgcagccgggtaaaacggcggctttcccgctgcccacgcaagcgccgcgcgccgacacgaagcttgccatggtttccaggcgtgatgaaattggcgagctgatcgcgccgcctgaagacgattacgattatgatgccaagccggttgcagccgctgctccgaagcaggctccggctccggttcagatggcctccgccgcccccacgaagccggctgctgtggcctctgctgccatgcgcaagaaggctgccatcattggtaagactgcggataccggggtgcgcaccacaaccaagggcgcacgtcgtatggccaaggcaccatccaggccgcgccctgtgatacggcctgctgtcatgccgagctcggaaatcgccatgtccaccgagccggtttccagcacggttcccgtggcgagcccggtcttgcgcaatgatgcgctgcgctctgccccgaccatggtttacactgccggtttccagcgtggtgatctgccgagcgcccgcgccaaccagttcagcggcaacgccgtcaccttcctgaccgtggcgaagttcaccgaaaccaattga

SEQ ID NO: 509 - DNA, 381 bp, Brucella melitensis
atgaaacgcttccgcatcgttgcccccctcgcactcatgtcgcttgcgctggctgcttgcgaaacaacaggcccgggcagcggcaatgccccgatcatagcccatacccctgccggcatagaaggaagctgggtcgatccgaatggcatcgcttcctcattcaatggcggcatctttgaaacccgcaccaccgacaccaacgaaaagctggcggagggcaactatctctacctgtcgccgcaactcgttgaaatcaacatgcggtccatcgtgcgcggcaccacctcgaaggtaaattgcgcactggtttcgccgacgcaacttaactgcacctcctcggccggttcgcgcttctcgctcacccgccgcaacgccggctga

SEQ ID NO: 510 - DNA, 987 bp, Brucella melitensis
atgaccggtttcgacatcacattgctcatcctggttgcactggttctggcggcattgattgccagcatcaaaaccgtgccacagggctataattatacgatcgagcgtttcgggcgttatacgcgcacgctcaatcccggacttaacctcatcgttccgttcttcgatcgcgtcggtgcgcgccttaacatgatggaacaggtgcttgatgtgccgacgcaggaagtcatcacccgcgacaatgccatcgtgggcgtggatgccgttgccttctatcaggtactgaacgcggcacaggccgcctatcaggtggcgaagctgcaatatgcgatcctgaatctcaccatgaccaatatccgcaccgtcatgggttcgatggaccttgacgagctgctttcaaaccgcgatgccatcaatgaccgccttttgcgcgtggtggatgaagcggcgcatccatggggcatcaagataacccgcgtggaaatcaaggatatcaacccgcccgcagatatcgtcacctccatggcgcgtcagatgaaggccgagcgcgacaaacgcgcgcaggttctggaagccgaggggaaccgcaacgcgcagatcctgcgcgccgaaggccagaagcaatcgcagatactcgaagccgaaggcaagctggaagcggccaagcgcgaggcggaggcgcgtgaacgccttgccgaagccgaggcaaaagccaccaccatggtttcgcaagccgtcgccaatggcaatgtgcaggcactgaactatttcgttgcgcagaaatataccgaagccctcagcaatattgccagcgccaagaaccagaaaatcgtgctgatgccgcttgaggcaagctcgctcatcggttctctgggcgggatcggggctattgcgcgcgaggttttcggcgatggttcccagcctgccggtccggctccgcaaccgcccgcccgcgcgcgtagcgttccgcccactgggcgcgactga

SEQ ID NO: 511 - DNA, 717 bp, Brucella melitensis
atgaagaagataattctcagcttcgcattcgccctgactgtaaccagcacggcgcacgcacagctcccggtgacagatgccggctccatcgcgcagaacctggccaaccatctcgaacagatggtgaagttcgcccagcagatcgagcaactgaaacagcagtttgaacaacagaaaatgcagttcgatgccctgaccggcaaccgtggccttggcgatattctccgcgaccctacgctgcgtagctatctgccacataactggcgagatctctacgaagcggtgatgagcggcggctacctggcggcggctggcgaaacggccaacctcttacgcaaaagccaggtatacgatccgtgtgcctccatctccgacaaagatcagcgcatcgcatgtgaggctaaagtggtgaagccggtccaggacaaggtcatgacgtccaaagcctacgacgccactgacaaacgcctacaagagatcgagagcttgatgcaggagatcaacaagacgggagacccgaaggcgattgccgaattgcaaggccggatcgaaagcgaaaatgccatgatccaaaacgaagacacccgccttcatctctaccagcagatggcagaggcacaggacaagctcctggacgaacgccagcacgaattagacgcgaaggataatgcccggcgcggctatccgcagccgaaagcactggaagccgcctattaa

SEQ ID NO: 512 - DNA, 720 bp, Brucella melitensis
atgtttggacgcaaacaatctccacagaaatcagtaaagaacgggcagggcaatgcgccttcggtatatgacgaagcgttgaactgggaggccgcgcacgtccggctggtcgaaaaatccgaacgccgcgcgtggaaaatcgccggggctttcggcaccattaccgtgctgctcgggatcggcatcgccgggatgttaccgctaaagcaacatgtgccctacctggtgcgcgtcaacgcacagacaggtgcgcctgatatcctgacctcgctcgacgagaagagtgtcagctacgacactgtaatggataaatactggctctcgcagtacgtgatagcgcgtgaaacctacgactggtacacgctgcaaaaggactacgaaaccgtaggcatgttgtcgtcgccgtccgaagggcagagctatgcaagccagttccagggcgataaggcgcttgacaagcaatatggctcaaatgtgcgcacatcggtaacgatcgtaagcatcgtgccgaacggcaagggcatcggcacggtgcgctttgcgaagacgacaaagcgcaccaacgagaccggtgatggcgaaacaacgcactggatcgccaccattggctaccaatacgtcaatccctctttgatgtcggaatcggcccgcctgacaaacccgctgggtttcaatgtcacgagctatcgcgttgatccagaaatgggagtggtgcaatga

SEQ ID NO: 513 - DNA, 4722 bp, Brucella melitensis
gtggtttctcacaacgtacagaacgaagcggtcaaagctgcgacgacggcttccacccgaacgacgcgaaaaaccaaggctgcgggtgttccgccggctcaaggcctttatgatccgcgcaacgagcatgatgcgtgcggcgtcggcttcatcgcccatatgaagggcaggaaatcacatgtggtcgtggaaaacggcctgaagatgctggaaaacctcacccatcgtggtgctgtcggcgccgatccgctgatgggcgacggtgcgggcattctggtgcagattccagatcgcttctttcgcgaggaaatggcgcgtcagggcatagacctgccgcagccgggtcactatggcgtcggctatattttcatgccgcgcgacccggatctgcgcgcccatgcggaagagatcgtcagggaagtgatcgccgccgaaggccagaccttcatcggcttccgcgaagtgccggtcgataattcttcgctttccaaggctccgcatatcgcggccaccgagccgttccatatgcaggtcttcatcgggcgcagcccgatgctggaaaccgacgacgatttcgagcgccgcctgttcgtgctgcgcaaggtcatctccaaccgcatctatcaggagaatgacggcgacgataagggtttctatgtcgtgtccatgtcggcccgcacggtggtctataagggcatgttcctggcctatcaggtcggcgcttattatctggacttgaaagacccccgctttgaaagcgcggtggcgctggtgcaccagcgtttttccaccaacacctttccgtcctggcgtcttgcccacccctaccgcatggtcgcccataacggcgaaatcaacacgctgcgcggcaatgtcaaccggatggcggcgcgccaggcttcggtcgatagcgaactgttcggcaacgatatttccaagctctggccaatttcctatgagggccagtcggatacggcctgtttcgacaatgcgctcgaattcctgcatcagggcggctacagccttgcacatgccatgatgatgctgatcccggaagcatggtcgggcaacaagctgatgtcggatgagcgccgcgcgttctacgaatatcatgcagcactcatggagccgtgggatggccctgccgctgtcgccttcaccgatggccgccagatcggcgcgatgctggaccgcaacggcctgcggcctgcacgctatatcgtgacggaagacgatttcgtcattctggcttcggaagcaggcgtcctgccggtcgatgaaaaaaagatcgtcaggaagtggcgtcttcagccgggccgcatgctgctgatcgacatggaagaaggccgcatcatctccgatgaggaaatcaagtcgcagatcgcgcagaagcacccttacaagcagtggcttgccaatacgcagctcattctggaagacctcaacccggtcgagccgcgtgcgctgcgcaaggatgtgagcctgctcgaccgccagcaggccttcggctatacgcaggaagataccaagttcctgatggcgccgatggcgaccacgggtcaggaagccatcggctccatgggcaccgatacgccaatttcggccatgtccgacaagtcgaagctgctttacacctatttcaagcagaacttcgcacaggtgacgaacccgccgatcgatccgatccgcgaggaactggtgatgagcctcgtctccttcattggcccgcgtccaaacatcttcgatcttgtcggcgcctcgcgccgcaagcgtctggaagtgcgccagcccatcctgaccaatggcgatctggaaaagatccgttctatcggccacacggaagaccgcttcgataccaagacgctcgacatcacctataatacgggcgagggcgcgaccggtatgcatggcgccatcgagcgtctgtgcgaccgcgcggaagcagccgttcatggcggctataacatcgtcatcctctccgaccgccaggtcgggccggaccgtattccgatcccggccctgctggcgacggctgccgtgcaccatcacctgatccgcaagggtcttcgcacctcggtcggtcttgtggtggaatcgggcgagccgcgcgaagtgcatcattttgcctgcctcgcaggctatggcgccgaagcgatcaatccctatctcgccttcgacacgctgctcgacatgcatcgccgccgcgaatttccgccggaagtcgacgagcatgaagtggtcaagcgctacatcaagtcgattggcaagggcatcctcaaggtcatgtccaagatgggtatctcgacctatcagtcctattgcggcgcgcagattttcgatgcggtcggcgtcaggacggatttcgtggacaagttcttcttcggcaccgccacgaccatcgaaggcgttggcctcgacgagatcgcggaagaaaccgtgcgccgtcacaccgatgctttcggcaatgatcccgttcttctgaacgcgctcgaagtcggcggcgaatatgcctatcgtatgcgcggcgaggcgcatatgtggtcgccggatgcggtggcaaagctgcaacatgcggtgcgcacgtccaatccagacacgttcaccgaatatacgaggatgctcgacgccaagtcgtcgcaggccaagaccattcgcggcctgttcaatatccgctttgccgaggaacgtggcctgaagcccgtttccatcgatgaggtggagccggcaacggatatcgtcaagcggttctcaaccggcgccatgtccttcggctcgatctccagagaggcgcataccacgcttgcccgcgcgatgaacgccattggcggcaagtcgaacaccggcgagggcggcgaggagccggatcgtttctacccgctgccggatggcacggcgaacccggaacgctcggcaatcaagcaggtggcctcgggccgtttcggtgtgacgacggaatatctcgtcaattccgatctgatccagatcaaggttgcgcagggcgcaaagcccggcgaaggcggccagcttccggggcacaaggtcgatgcgaccatcgccaagacccgccactccacgccgggtgttggcctcatttcgccgccgccgcaccatgacatctactcgattgaagatctggcgcagctcatctacgacctgaaaaacgtcaatccggcagccgatatttcggtcaagctggtgtcggaagtgggcgtgggcacggttgcagccggtgtcgccaaggcgcgcgccgaccatatcaccgtgtcgggctatgatggcggcacgggcgcttcaccgctcacctcgctgaagcacgccggttccccgtgggaaatcggccttgccgaaacccaccagacgctggtgctgaacgggcttcgctcccgcgtggcgcttcaggtcgatggcggcttgcgcaccgggcgcgacgtggtcatcggcgcgctgctcggggctgacgagttcggtttctcgaccgctccgctgattgcggctggctgcatcatgatgcgcaagtgccatctgaacacctgccccgtcggcgtggcgacgcaggatcccgtcttacgcaagcgtttcaagggcacgccggaacacgtcatcaacttcttcttctatctggcggaagaagtgcgcgcgcttttggcccagatgggtttcacccggctggaacagatcatcggtgaaaccgagcttctggaaaagcaggcgatgatcgaccactggaaggcgaaagggctggatttcagccgcatcttctacaagccggaggccgagaagcacgaaatctactggaccgagcgccagcaccacccgatcgacgatattctggatcgcaagctgatcgaattggccgcgcctgcgctcgaagaacgccagccggtcaagatcgacgtggagatcaagaatgtggatcgttccgcaggcgcaatgctctcgggcgaagtggccaagcgtttccgccacaagggcctgccggaagacaccatctccgtcacgcttcgcggtacggctggccagtccttcggtgccttcctcgcacgcggcatctcgtttgaactgatcggtgacggcaatgattatatcggcaagggcctttcaggtggccgcatcgtggtgcgcccgccggaagacacgcgcatcgtcgccgaggattcgatcatcgtcggcaatacggtgctctacggcgcgcttgaaggcgagtgctatttccgcggcgttgcgggcgagcgtttcgccgtgcgcaactccggtgcggttacggttgtcgaaggtgtgggcgaccacggctgcgaatatatgaccggcggcgtggttgtcgtgatcgggcagacggggcgcaatttcgcggcgggcatgtcgggcggcgtcgcctatgtgcttgatgaggaaggcgatttcgcgcagcgttgcaacatggcgatggtcgagctggagccggtgccggaagaagacgacattctggaaaagctgcatcaccatggcggcgatctcatgcacaagggccgtgtggacgtttccgccaacatgacccatcatgatgaggagcgtctggtgcagctaatcgccaaccacctgcactatacgggttcgacgcgcgcaaaagacattctcgacaattgggaaagctatcgcccgaaattcgtgaaggtcatgccggtggaatatcgccgcgctctggaagagatggagcgcatgcagatcggcgtggcggctgagtaa

SEQ ID NO: 514 - DNA, 315 bp, Brucella melitensis
atggcgcccaagttcaacaggagtttcgttatgaccatcaagcacaacatcatcgccttttccgccctcgccctgattgcaggtttctcgcttacgccagccgctttcgccgaagatgcgatgaaaaccgaccatatgaagtcggacgcgatgaagagcgataatatgtcaaaggatgccatgggcaaggaagatgccatgaagggcgatgccatgcacaaggattccaagaaaatgaagaagcacgacgccatgaaaggcgatgcgatgaaaggcgacgccatgaaaggtgacgcaatgaagagcggtcagtaa

SEQ ID NO: 515 - DNA, 786 bp, Brucella melitensis
ttgatgagcaccattggcaaagctctgacgcttctggatgtcctgtcgcggctgaataccgaggcgggattgaccgagattgcgcaggcctgcggatatgacaaggcgacgacccgccgttttctggtcgatctggaaaagcacggcttcgtcgagcaactggccgaaagccggaaataccgaatcggggccgagccgctgcggctcgcgcgcattcgcgaagcccgctatccctttctgggcacggcccttccattcgtaaggcagcttgccgagcgaaccggcgaaaccgtgcatctttccgaattttccaacgggcggctttccaccattcatgtggaagaatcaccccgcgcccatcgggttttcatcaatgtcggcatgatcctgcctttccacgccacggcatcgggcctcgcctatctggcagcctgtgcggacgatgtggtggaggccacggtgacgaaatcgctcgatacattcacggaatttacgatcgctgacccggaggaagtccggcggcgcgtgcgcgaagcacggcaaaacggcttttccgttaaccggcaggggctggaagtgggcgtgatgagcacatcggcggcgatcctcacacccggatcgagaccggttggctgcattacggtggccgcaccccttgcgcgtgccgatgacgggatcgtcatgcgatatggcgcggacgcccatgccacggctgaggctatttccgctgccctgttcgcagaacacaggcaagcccgttccaatcaatcgaagaggaacggttga

SEQ ID NO: 516 - DNA, 681 bp, Brucella melitensis
atgagcgcgctttccatcagccgatatctgactgacttctcgacccaccatattgacgataaggcggttgagatcattaccgcgccggttccgccaaaaccgctgacacccgtagcgggcgaggctgcggaaaagcctgccgcagtggggcaggagcaggcggaaatggccgcagtgatcgcgctggaggaagaaaaacgcgcggctttcgaggctggccgtgaagatggccacagggaagcacaggtgctttacgaggctgaaaaggcgcgtctcctgcgtgaacatgaagcggaaatcgagacgctgcgtgccacattttcgcgcgaacaggctttgttgctggcgggtagccttaccgaagcactgagcgcgctggaacagagcctctccggccagatggctgaaatactgatgccacttctggccgcgaaaatggagcatgaggcggtagcggaatttgcccgtcgcatcgcggcactggcgctggaaggtgaggcgccggaaatctccggcccggcccggcttctggaagcattgcaggcccatggggtgcttttgccctccggttgccgcttttcagagacggcatcgaacgaactttccttttcctttggcgaacggatgctcgaaacgcgcatcgcgccgcttcttgaagaactgaaggctgcggtgaaatga

SEQ ID NO: 517 - DNA, 1101 bp, Brucella melitensis
atgaacattgagcccgaaacgaagcgcgagatcatcattgttcgccggggcgggcatgacgaccatgaggcgcatcatggcggggtgtggaagattgcctatgccgacttcatgacggcgatgatggcttttttcctggtcatgtggctcatcaatgctgccaatgaggagaccaaggcggcggtggcgagctatttcaatcccgtcaagcttatagaccgccattccagcccgaagggcgtgcaaaatgtggaccagcgcgatggcaaggttcgttttgaaagcgaccagcaggtggaaagtagcaccaaggtcgtcaacgacaccactgtgcgcccggcaagcgaccaggaggagcggcagctcttccgcgagccctatgccatgcttgcggaattggcgcatgaaacaggcgttctgcaaaatcagtcggcaaagggcgatggcggcacggcgcaatccggctccgccagcggtgcggatggcggcgaggcctatcgggatcctttcagcccggattactggtcgagcaaggcggtgggagacctgaccccgcctgcgccgcaaaccgtgccgcaaactgcacccttgccgcaggcgcagcccaaaaaggctgaaacgcaggaagaactgatcgccgatctgaagaaagccgcaacaggtgaaccggccccgaacgcgggcaaggccgccaaacccgaaccgatgccggatgttaccgtggttcccgtggaagggggcgtgatgagccagcttaccgacaaggttgattatggcatgttcacgatcggctccgccaagccggatgcccgtgtggtgcagatgctggagcgcattgcgcaggtgattgcccgccagccgggcgaggtcatcatcagcggtcatacggatgcgcgcccgttcaaaagcgcgacctatgacaattggcggctatcctcggcccgtgcccagatggcctattatatgctggtgcgcggtggccttgatgaaaagcgcgtgttgcgtgtcgagggctacgcagaccgccagccgaagaaccccaacgatccgaatgccgcggaaaaccgccgcatcgatattttcatcaagtccaagccatga

SEQ ID NO: 518 - DNA, 1620 bp, Brucella melitensis
atgctattcaagacaacgggaacaaggtctggatcattgaaaacattgcgaagcctgatgatggcggcaaccttgctgacggcattctcggggattgcctcggcacaaagtgccaattcactggttatcgcgcgaaatatggatatcaactcgctcgatccgcaccggaccttctgcgatacctgccagatctacgattctgccgtctatgagggtttgctttcgctggataaggacaacaaggttgtgccagtgcttgccgaaagctatgcagccaatggcgaccagaccgagtttacgttcaaaatcaatccaaaggccgtattctcggatggttcacgggtggaagcaaaagacgtcaaatggtcgtgggaacggcttaaaaacgtcaagggcagcccgtcgttcctggccgatactattgcttcgatagaaacgcccgacgaagcaacagtcgtggtcaaaacccgggcaccgaattctgaattcttcaatgttgtagcctcgccttatttcggtatcgtgaacagcgatgtggccacgaccgaggctaaggcggaaaatggggcggacgcagcggagaaagataatgcggaagcgtggtttctcgcgcattcggctggcagcggtcccttcgtcctcagcgcttatgagccaaattctgaactgcgtctaaagcgaaacgaaaaatactggcgggaagcgccgaaggtggatgaggtcatcttccgccaagtgaaggacgctgtggcacaggcacaaatgctggagaatggcactgcagacatcgcgatgcagattgatcccgagacggccaagacattccgtaacaaggacatcaaggtcgattccatccattcctacaacttcatctatctggcgctttcgccgggtgcaaaatcgaacgccgtgccgctgactgcagacattcgagaggccatttctattgcgatcgaccgtgaatcgctgctcgacttcatgcttggagacaaaggtcagttgatcggaacggcaattccgataggttttccgggcggaacggggcataaaattcccgaatataatcccgaaaaagccaaggagctgcttgccaaggccggtcatcctaatggtttcacgctggaagccgtttatccgaacctgaacgtctatggcgtagatttcacccagatgatgcaaaagatccagcaggatctttctcagatcaatgtcaaggtcgagctgcagccggtgccgtttgcaagctggcgtgaaaaggctaatggcgacggaatcccgatgacagccgtttattacgcgccggatttcttcggcacatcccagtatgtggatgcatttggattggcgaagggcagtctctgggcaaaacgcgccggggaggctcgcgatccatcattcgtaaagactgaaattccgcagatcatggcagatgccctcagagcaccgctagatgaggcggacaaggtctggttcaaggcgggcgaggccatggccgcgtcgaatgtcatcattccgatgctgagcccagacgttattctggcatataacaacagggtgaacggcgtgcgctattccgcctgctgcaatctgccattgcaggagctttccgtatccagatag

SEQ ID NO: 519 - DNA, 837 bp, Brucella melitensis
atgtcgtcagtcctttcccgctatgcgcttacccgtcgcgcgggcctgaaagcccttctcttcaccgctgcggccctcaccgtcggctttgcatccgctcccagccatgcagaagacaagaccatcaaggtcggcatcatgggcggcgaggacgaagatgtctggaaagtcgttgctgaagaaggcaagaagcatggcctcaatatcgagcgcatcaccttcaacgattataaccagccgaacgaagccctggagcgcaaggaaatcgacgccaacgcattccagcacaagccctatctggacgagcagatcaagcagcacggctacaagatcagcgttgcaggctataccgcagtctggccgatcggcatttattcccgcaaggtgaagaagcttgaggaactgaaggacggcgccaccgttggcgtgccaaacgacccgaccaatgaaggccgtgcgctgcgcgtgctggaagaacagggcctcatcaagctgaagccggatgcgggcattctggcgacgccaatcgacatcgttgaaaacccgaagaagcttgaaatcaaggaactggacgccggcgtcgtcggccgctccatcgatgatcttgacgcggcaatcgtcaacaatgactgggctgcgaaagccgggctgaaaaaagaggatgccattggctgggaatcgaaggaaaacaatccctacaacaatttcatcgccgttcgcaccgatgatctcgaccagccttgggtgaaggcactggttgcctcattccagaacgacgccgtgaaggccgaacttgagcgcgcctacaagggcaccggcatcccggcctggaattaa

SEQ ID NO: 520 - DNA, 1095 bp, Brucella melitensis
atgaaccccatgttccgtgctgccggttgcgcggtcctgtttggcgcgctgacggtgcttgccgcttgcggcaaagaggatgaaaaggcgcaggaagctgcgcccatccgcccggttctctatacgatcgtggagccgaagcctgtcgcccagacgggttttgcgggcacagtcgagccgcgctattcgaccgatctggctttccgcgttctggggcgggtcatagcccggcctgtgaaggtgggcgatctcgtgaagaagggcgagatggtggcaatgctcgatccatcggcgcttgatcttgcggtgcaatcggcaagggccgaccttgccagtgccgaggcacaatatgccaatgcttcggcaagcgaggaacgccagcgtatcctgctgcgtggcaacaatgtttcgcaggccgattatgacgcggccaggcaggcgcgcgacagcgccgaggcagggctggaaaaggcgcaggccggtttgcgcaaggccgaagaccagcggggatatgccgtgctgcgtcccgatttcgatggcgtgatctccgcaacggctgccgaagtcgggcaggtggtttcggcgggtcaggcgatcgtgaccgtggcgcgtcccgatgtccgggaagcggtggtggatattcccgacagcatgaccgaatatttcaagcccggcactcctttcaatgtgcagcttcaggccgatccttccgtgaaaggaacgggaagcgtgcgcgaggtcgcgccgcaggccgatgcacaaacgcgcacacgccgggtgcgcatcgcacttgacaatccgcccgaagggttccgcctcggcgcaaccattcaggccgctcgttccacgccggaaacgggcttcgtttccctgcccatgccgtcgcttctcgaacaggacggcaagaccagtatatgggtgatcgatcccggaacacagaccgtgagccttcacgatgtgcgcgttatcgagcgcaagggagcaagttttgtggcaggcggggtcgaggccggcagctatgtggcaattgccggtgtgcatgaactgaaagcagggcagaaagtccgtctggacgagaaaggaagcgggctgtga

SEQ ID NO: 521 - DNA, 207 bp, Brucella melitensis
atgaaattataccgtttcatcaccgggccggacgattccgctttctgtcatcgtgtgacggcggcgctgaacaagggctggcagctttatggctcgcccacctatgccttcaatgccgcaactggcgtcatgcattgcggccagccggtggtgaaggaagttgatggcgtcgattacacgccggatatcaagctcggcgaatattga

SEQ ID NO: 522 - DNA, 1398 bp, Brucella melitensis
atgaccggacttaagcccgacaacaacttctttgcggaagtgctcaacgttgccgacctccctgctgccgccattgcaagccgcatcacggatatgcgcaccggcgacgcagttgaaatcgtcaacgaactggatgccgatgatgcagtcgccgtcattgcccagctttcgcacgacgacgccatccgcctgctggaccagccggaactgcatcgcgcggccgaaatcgtcgcagcgctccagcccggtctcgcaagcctcctgctcgacggtatgtcggccgaccgcgccactgacgtttttcaggaactcgaagacgtcgaccgcgcccgtctgtttcccattctcgcgcctgaaacgaaggctgcgctgaaaaagctgatgggctatccgccgaatacggcagggtcgctcatgaccatcgaattcatcgctgtgccttccaactggactgtcggccagacgctggaccatatccgcaaggtcgagcgcacccgcgagacggtttatgcgatctatgtcgtcgatccgttgagccgcgtcctgttgggcgtggtcagcctgcgccgcctcatcatccgccagccggatgagccgatcctgtcgatcgcccgtgatgacgagccgatcaccatttcgccgctggcaagccgcgaggaagtggcgcggcttttccgcaagcacgaccttctggccgtgccggtggtggatgaaggccgtcatatcattggcatcgtgacggtcgatgatgtgctggacgccatgacggaagaggcaagcgcggacgcttatcggtttggcggcatggaggcgctggacaagccctatatgcgtatcggtttcggcgaaatgctgaaaaagcgcgccggctggctcggcattctgttccttggcgaaatgttgacggcaagcgccatgcagcatttcgaggcggaactggaaaaagccctggtgctcaccctgttcattccgcttatcatgtcttcgggcggcaattccggttcgcaggccacgtcgctcatcatccgcgcgctggctttgcaggaaatcaagcttaaggactggtggcgggttgcgttgcgcgaaataccttccggtcttgcacttggcggttttctgggcttcatcggcattattcgcatcaccacatggcagacgctcggtatttacgactatggcgaacactggattctggtggcgtttacggtcggcatggcgctcgtcagcattgtgacattcggctcgctgaccggctcaatgctgccttttgtgctgcaaaggctgggctttgatcctgcaagcgcgtctgcgcctttcgtggcgacattggtggatgtgacgggcctcgtgatctatttcagcgttgcgctggtcattctgtcgggcacgcttttataa

SEQ ID NO: 523 - DNA, 1023 bp, Brucella melitensis
ttggaaagtatcgagcgcgccatcagaaacgcatttgccaaggcagatgcacataatccggcgacccgtcagcgaatctatgaatcggcctggggcgcccatgagcgcgccatggcgaccaacacggcgctgagcgccgcgcaaaaggaacagcgccgcgaaaaactgaaagacgccatttcccgcattgaggaggaattcgcgaagcggcatcaagatggtgaagcgcagcgcgaaccctcgctggattcgccgcaccagaacgatcctgttctcggctcaagcatggcagaaagcacgcccgtactggacagcggcgatattcgcccaatgtcgagaaagaagcggcccgccgccgaccttggctacgagggtggcacctcgcggaaggatcacaagaaaaagcggcattcgcctttttacagctatggcatcccggcactcgtgttgctggttgccgtgatgatcggctattcgctttataacagcctgtccgatctggggcgcggtccatcgaccgggccgctgatgagcggtaccagccttgcgcctttgaaggaaggtgaagagccgggcggggcaaagtggatcaatatctttcttcccgacgaggccacgcgcatatcggttcagggcagtgcgacagcggaaatcctgcaagatggcaagaacaaatttgcccgcatccgctcctccggtgtgggtgacactgtcactttcgatgtcggcgaaggcattctcgaccagcttgtcggcaagaaggcaaccttcgatatcatcgcacgcagcgatgatggcaagcttacgcaaatgtcggtcaattgcaacctggcgggcctcggagattgtgggcgcaggcgctatgacgtgaatgaatcgctgaatgattttctgttcgatatggatttttccgcgagcagaaagccaggcggcgcaggtacgattaccgtcgattccgatctgagcaacagcggcaagccggtcgatatatatgcgatccgggtgactacggctgacaaataa

SEQ ID NO: 524 - DNA, 2556 bp, Brucella melitensis
gtgacactgacccgcaagcccatcgcagcatctgccacctttcttctgccggaccgtttcgtcaaatggtttgcggccaagggttggtcgccgcgtgcgcaccagctggagcttctggcgcgcgccgaacagggacagtccacgcttctgatcgcacccaccggcgcgggcaagacgctggccgggtttctgcccgcgctggttgatctggaaaagcggcgaagcaaagcaatttcaggaaaagtgggaaccggttttccgtccggaattgcgccaaaatcaaaaagtggcgttcacacgctctatatctcgccgctgaaggcgcttgctgtcgatattcgccgcaatctcactgtgccggtggaggaaatggggcttgatatttccatcgagacccgcaccggcgacacacctgcccacaagcgtcagcgccagaaactggcgccgccggatattctgctgaccacgccggagcagcttgcacttttgatcgcgtccagggtggcggagcaatttttcaaagatttgcgctatgtggtgctggatgaactgcactcgctggtgatttccaagcgcgggcatttgctggcgctggggctggcacggctgcgccgcctgcaaccacagttgcagaccatcggtctttccgccaccgtggcggagccggatgagttgcgccgctggctggtggagcaggatgggaccgggtcgatggccggtcttgtcaccgtcgatggcggggcaaaaccggaaattaccattctcgattctaaggagcgggtgccatgggcggggcactcctcacgctatgccattcccgatatttacgcggcgatccgccagcaccgaacgacgcttttgttcgttaatacgcgcagtcaggcggagatgctttttcaggagctctggcgggtcaatgaggagacgttgccgattgcgctgcatcacggctcgctcgatgccggccagcgccgcaaagtggaacaggccatggccgccaatacattgcgggcggtggtcgcgacctcgacgcttgatctcggcatcgattggggcgatgtcgatctggtcatccatgtcggcgcgccgaagggcgcaagccgccttgcgcagcgcatcgggcgcgccaatcaccgcatggacgagccaagccgcgccattctggtgcccgccaatcgcttcgaggtgatggagtgtcgtgccgcgcttgatgccaattatctgggcgcgcaggatacgccgcccttgatcgacggggcgctggatgtgctggcgcagcatgtgctgggcatggcctgtgccgagccgttcaacgccgatcagctttatcgtgaggtgcaaagtgcggccccttatgcaaaccttccgcgagacaccttcgaccgcattctcgattttgtggcgaccggcggctatgcgctcaagacctatgagcggtttgcgaaaatccgcaagacggtggacggcacgtggcgggtgtccaatccgcgcatcgcgcagcaatatcgcctcaatatcggcaccattgtcgaagcgccggaactgaatgtgcggctcacgcgcggcggcaagggcgcgaatgcgcggggcgggcgcgtgctgggccgcatcgaggaatattttctggaaacactaacggctggcgataccttccttttcgccggaaaggtgctgcgctttgagggtattcgggaaaatgaatgcatcgcctccaatgctgccgggcaggacgcaaaaattcccgtctatgcgggcggcaaatttccgctttccacctatctcgccgcgcaggtgcgcgccatgcttgccgaccgcgcgcgctggcaattcctgccgcagcaggtgcgcgaatggctggaggtgcagcaatggaaatccgtgctgcccggcacggacgaacttttgatcgaaaccttcccgcgcggcaaccgcttctacatggtggcctatccgtttgagggcaggctggcgcatcagacgctcggcatgttgctgacgcgccgtctggagcgcatgggcgcgcatccgctgggctttgtcaccactgattattcgctgggtctctggggcctcaaggatatggcgtccatgatccgcatgggcaggcttaacctttcgcgcctgttcgatgaagacatgttgggcgacgatctggaagcgtggctggatgaaagctatcttctcaagcgcacgttccgtaattgcgccgtgatttccgggcttatcgagcgccgtcatccggggcaggaaaagaccgggcgtcaggtgacggtttcgacggatcttatctacgacgttctgcgcagccacgagccggaccacattctcttgcaggccacacgcgcggatgcggcaacggggcttttggacatcaagcggcttggcgacatgctggcgcgtgtgaaagggcatatcctgcacaagccgcttgaccagatttcgccgctggcgctgccggtgatgctcgaaatcgggcgcgagcgcgtggcgggcgagggcgatgaaatgctgcttgaagaagcagccgacgatcttgtcagggaagcaatgcaatga

SEQ ID NO: 525 - DNA, 1581 bp, Brucella melitensis
atgttgacggataggttgcgcgggctgatactcgcatttgcttttgtttctgtagcgtttgtttccggcgctcatgcagatccaaagctgaatttttcctggccggtgaatgtagggccgctcaatccgcacctttattctccgaaccagatgtttgcccagaacatggtttacgagccgctggttcattataatgctgacggcaccgttggcccctggctggcagaatcctgggaagcgtttcaggatggccgatcctacacattcaagcttcgggaggacgtcaagttctcgaatggcgaggttttcgatgcggctgcggtcaaggcaaatattgataccgtattgcaaaaccgcccacgtcataactggctcgaacttgttaaccagatggtctctgccgaggttgtcggtccttacaaggtgcggattaatctcaaaaaaccttattacccgttattgcaggagctttccctgccgcgccccttccgcttcattgccccgtcgcagttcaaaaatggcggcaccgcagatggcattgtggcgccgattggtacgggtccgtggaaattgaccgagaccaaacttggcgagcacgacgtatttacccgcaatgatagctactggggtcccaagcctgcttatgagcagataactgtcaaggtgatacccgatccgaatacacgggcgattgccttcgaggctggcgaaatagacctgatctatggaacggaagggccgatttcccccgatactttcgagcgcttccagaaaatgggcatctataatactgagctttcggagccgttagaaacgtgcgttttggcgatcaacaccaatcacggcgcaacaaaagacctcgctgtccgcaaggccatcaatcatgcagtcgataaggacacgatgattgccaccgtgctctacgggacacagaagcgtgcagataccctgtttgccgataatgttccctacgccaatatcggcctgaagccttatgctttcgacccggctctggctgcccggcttctggatgaagccggatggacagccaaggcaagcggcgatatccgggagaaggatgggcagcctctggcgatcgagttgtgcttcatcggcacggatgcgatcagcaaatcgatggccgagatcgtgcaggcggatctgcgtaaggtcggtatcgatgtcaagctgacgggcgaggaggaaagcagcatctatgctcgccagcgcgatggtcgtttcgatatgattttcaaccagacctggggtgcgccctacgatccgcacgcttttgtcagctccatgcgcgttccctcccatgccgattatcaggcgcagctcggcctgccggacaaggcgaaaatcgatgcggagatcggtcaggttcttgtctcgactgatgagacggcaaggcaggcgctttacaaggatatcctgacccgtcttcacgaggaagcggtttaccttccgctcacctctgtcaccgcgatggcggttgcgaaacctgaggtcggcaaaatcacattcggagcgatgtcgagcgagatcccctttgagaaactgaccccgaaggcgaactga

SEQ ID NO: 526 - DNA, 2217 bp, Brucella melitensis
atggcttatgtaaatttcaaggttgaaaccgacgccgacggcattgctctcgttacatgggacatgcccgaaaagtcgatgaatgtcttcaccgtcgatgcgatgcaggaactgaatgcaatcatcgatgcggtgatagctgacgacaagatcaagggtgttgtcatcacctccggcaaggaaaccttctccggcggtgccgacctgaccatgctggaaggcatgttcaaggaattccagaagcagaaggtcaaggaccccgaaggcgcggtccagaccctgttcgacaatgtcggcaagatgagcggcctgttccgtaagcttgaaacctgcggcaaaccgtgggtttcggccatcaacggcacctgcatgggcggcgcatttgaaatgtcgctcgcctgccatgcgcgtgcggcgtccgatgcgccgggcgtgaagatggccctgccggaagtgaaggtcggccttttccccggtgctggcggcacgcagcgcgttccgcgccttgccaaccagcaggacgcgcttcagatgatgacgacgggttcaagcctcaccgcgcagcgcgccaaggctatgggccttgtcaccgagattgctccggccaagaagctggtcgaaacagccaagaagctcatcaagggtggcctcaagccggttcagccctgggatgaaaagggcttcaagctgccgggcggcgcgatttattcggctgccggtgcaaacctctggcctgccgcgaccgccatcctgcgtcgcgaaacatcgggtaattatccggcggcactcgccattttgaagtcggtttatgagggccttctggtgcctttcgacaccggcctcaagattgaacagcgctatttcaccgaaatcctccagacgaccgaagcgggcatgatgatccgctcgctcttcgtgtcgttgcaggagttgaacaagggtgcgcgccgtccggttgacgaaaagccgaccaggctcaagaagatcggcgtcatcggcgcgggcttcatgggtgcaggcattgcctatgtgacggcgaaggccggtattccggtcgtgctgatcgaccgcgatcaggaatctgccgacaagggcaaggcccacacggcagacctaatcaccaaggaaatgcagaagggccgtgccaccgaggccgacaaggaaaaacttctgtcgctcatcacagcaacgccggattatgcccagcttgaaggtgctgatctggtgattgaagccgtgttcgaggaccgcgaagtcaagcgcgttgcgaccgagaaggccgaggaagtgctgaaatcttccgcagtcttcgcctccaacacctcgaccctgccgatcaccggtcttgccaaagtgtcgaagcgtccgaagaattttatcggcatccacttcttctcgcctgtcgacaagatgatgctggtggaagtgatcctcggcaagaagacctctgacaaggcattggccgtagcactcgattatgtccgtgcgatcaagaagacgccgatcgtcgtcaacgatacgcgcggcttctacgtcaaccgttgcgtgctgcgctatatgtcggaagcctacaacatgcttgttgaaggcgtcccggcggcgatgatcgaaaatgccgcccgcatggccggtatgccggtcggcccgcttgcgctcaacgacgaaacggccatcgacctgtcgcagaagatcctgaaagccacgcttgccgatcttggtccgaaggccgttgacccgcgccatgtggaattggtggacaagcttgtcaacgagttcgaccgcaagggccgcaagaatggcaagggcttctacgattatccggcaaagcctgccaagaagcatttgtggccgggtctgaaagacctctatccgcagcagaacccggacaagatcgatgtgaaggagcttaaagagcgcttcctcgtcaccatcgctctggaagctgcccgcgtgatggaagaaggcattgtgaccgatccgcgtgaagccgatgtcggctccatcctcgccttcggtttcgcgccttatacgggcggcacgctctcctatatcgacggtatgggcgcgaagaaattcgtccagctcgccaaggatttgcagaagaaatatggcgcacagttcaaggcgccgaagcttctgctcgatatggccgagaacggcgaaaccttctaccagcgtttcaatccctataagggcgaaacgaaaaaagcagcctga

SEQ ID NO: 527 - DNA, 3657 bp, Brucella melitensis
gtggccgttttccagaattttgcgccgccgatccgcgagcaaagcgcactgaggcaagcgatcactgccgcttatcgccgccccgaagccgaatgcgtttcagcgctggccgagcaggcaaccttgccggaggagacgcgccagcaaatccgttccaccgcccgcaagctgatcgaagcgctgcgtgccaagcataagggcaccggcatcgaaggtctggtgcatgaatattcgctgtcgagccaggaaggcgtggcgctgatgtgccttgccgaagccttgctgcgcattcccgatatggcgacgcgcgatgcgctgatccgcgacaagatatcgaatggcgactggaaatcccacattggcggcgggcgctcgcttttcgtcaatgctgcgacatggggcctggtcgttaccggcaagctcaccaataccgtcaatgatcgtggcctttccgccgctcttacccgcctcatcgcccgctgcggcgagccggtcatccgtcgcggcgtggacatggccatgcgcatgatgggcgagcagttcgtcaccggcgaaaccatcgatgaggcgttgaaacgcgccaaggagctggaagagcgcggcttccgctattcctacgacatgctgggcgaggccgcgaccaccgccgccgatgcagagcgttattataaggattatgaaaccgcgatccacgccatcggtcgtgcttccgcagggcgcggcatttatgatggtcccggcatttccatcaagctttcggcgcttcacccgcgttatacccgcgcgcaaagtgagcgcgtcatgggtgaacttctgccgaaggtgaaggcactcgcggccatcgccaagtcctataatatcggcctcaatatcgacgcggaggaggccgaccgtcttgaactgtcgctcgacctgttgcaaagcctttgcgaagaccctgatctggcaggctgggatggcatcggcttcgtggtgcaggcctatggcaagcgctgccccctcgtgcttgatttcatcatcgatctggctcgccgcaccaagcgccgcgtcatggtgcgtctggtgaagggcgcctattgggatgcggagatcaagcgtgcgcaggtggatgggctggaggattttccggtctatacccgcaaggtgcatacggacgtttcctatattgcctgcgcgcgcaagcttctggccgcgacggatgtgatctttccgcaatttgcgacccataacgcgcagacactcgccacgatctatcatctggccgggccggatttcaaaaccggtaagtttgagttccaatgcctgcacggcatgggtgagccgctttatgatgaagtcgtcggccccgaaaagctcggtcgcccggcccgcatttatgcaccggtcggcacgcatgaaacgctgctcgcctatctcgtccgccgccttcttgaaaacggcgcgaactcctccttcgtcaaccgtattggcgacaaaaacgtctcggtcgatgagctgatcgccgatccggtggaagtcgtccggtcgatggctgtcgtcggtgcgcgtcatgaccagattgcgctgccggaaaatctctatggcgcgcgccgcaattccgcaggctttgatctttccaatgaggtgacgcttgcggaactgagcaaaaccttgaaggaaacggcaggccgtgcatggaccgccgaaccgcaggtggcgggtgcaaaggtgaagggcgtaagccgtccggttctcaatcccggcgaccggaatgatgttgtcggcaccgtaacggaaatcgcagaggccgatgtggcaaaggcgatgaaggcagcgcaaaccgcgaccacaagctggtccgcggttgcgcccgcagaacgcgccgcctgtctggagcgcgcagccgatatcatgcagcgcgacatgccggctctgctcggcctcgtcatgcgcgaggcgggcaagtccatgccgaacgccattgccgaagtgcgtgaagccatcgatttcctgcgctattatgccgaacagacccgccgcacgcttggcgtcggccacaaggcgcttggccctgtcgtctgcatcagcccgtggaacttcccgctggcaatcttcaccggccagattgcggctgcacttgttgcaggcaatccggttctggcaaagcctgccgaggaaaccccgctgatcgccgctgagggcgtgcgcattctgcatgaggggggcattccggcggatgcgctccagcttctgccgggtgatggccgcattggcgccgcgctggttgcagcaccggaaacttgcggcgtaatgttcaccggctccaccgaggtggcgcggctcatccaggcgcagcttgcctcgcgcctgctgccgaacggaaagccggtcccgctcattgccgaaacgggcggtcagaacgccatgatcgtggattcctcggcacttgccgagcaggtggtgtttgatgtcatcgcttcggctttcgatagcgccggccagcgctgttcggcgctgcgtgtcctctgcttgcaggaagatgtggccgaccgcattctcaccatgctcaagggcgccttgcgtgagctttccattggccgcacggaccagctcaaggtcgatatcggcccggttatcaccgatgaggcgaagaacaccattgaaaagcatattcaggccatgcgcgatcttggccgcaaggtggaacagcttccccttggcccggaaacgcagaacggcacttttgttgcgccgacaatcatcgagattgaatcgctgcgcgatctcaagcgcgaagtgttcggcccggtcctgcatgtggttcgttacaagcgcgacgacatggaaagcctgatcgatgatatcaattcgaccggctatgggcttacttttggtttgcatacgcgccttgacgagacgattgccaatgttgcggatcgcatccgtgtcggcaatatctatatcaatcgcaacattatcggcgcagtggtgggcgtgcagcctttcggcgggcgtggcctttccggcaccggcccgaaggcgggcggtccgctctatcttggccgtctggtcgaaaccgcgccgatcccgccgcgtcacgcttcggttcataccgatgcggcgctgaaggactttgcccggtggctcggcaatcgcggcatgaacgatctggcgcaggcggcgcgcgataccggcagtgcttcggcgctcggtctcgaactcgaactgccgggcccggttggcgagcgcaatctctatgctctccacccgcgcgggcgcgtgcttctggtcccccagaccgaaattggcctctatcgccaattgacggcggtgctggcaaccggcaacactgcggtcatcgacgaggcttgcggtttgcgcgccgtgttgaaggatctgccggaaacagttgccgcgcgcgccatctggacgggcgactggcaggcggatgcgccttttgccggagcacttatcgaaggcgacagcgcgcgcatcaaggaggtgaactccaggatcgccgccctgccgggaccgctcgtactcacacaggcggcatcgccggaagatcttgcagccaatcaggatgcttattgcctcaactggctgcttgaggaagtctcgacctccatcaacaccacggcagcaggcggcaacgccagcctgatggcgatcggctga

SEQ ID NO: 528 - DNA, 1890 bp, Brucella melitensis
ttgcgacgtgtgggacaaggcgcacgcttactgaacactttccctcgggggaaggatggaggaaatatgaaaaccgttcgactgaccgccgcgcaggcactggtgcgctatctggccaaccagatgacgccggagggcgacacattcatcgcgggcgtctgggccattttcgggcacggcaatgtggcggggctgggcgaggcgctctaccgcgctcgcgagcatatgcccacctggcgcggccataacgagcagaccatggcccatgcggccatcgcctataccaagcagcttggccgcaggcgcgcctgcgccgtcacctcctccatcggccccggcgcaaccaatatggtgacagcggcagcacttgcccatgtgaaccgcctgcccgttctgttcgttccgggcgatgtcttcgccaatcgcggtcccgatccagttctccagcagatcgaggatttcaacgacggcaccatgaccgtcaacgactgtttccgcccggtaagccgttatttcgaccgtatcacccggccggaacagcttctcaccgccctgcctcgcgcctttcgcaccatgaccgacccagccgattgcggcccggtgacgctcgccttctgtcaggatgtgcaggcgcaagcctatgactggccggaagaattcttcacgcccaaggtctggcactggcgccgcccgccgccggacgagcgggaactggaaaccgctgccgccgccatcaaaaccgcgctgaagcccgtcattgtggcgggcggcggcgtgcattattccggcgcgcatgaggtgctgcgcgcttttgtagaaacacatggcatccccgttattgaaacacaggcgggcaaatccgcactgccatgggaccatccgctgaatttcggtcctgtcggcgtgaccggcgctgacagcgccaatgcggttgcggcagaagccgatctggtgatcggtgtcggcacacgctttcaggacttcaccaccggctcatgggccctgttcaggcatccggggcgcaggcttctttcgctcaatgtacagccctatgacggagccaagcataattctctgccgctggtagcagatgcgaagattgggcttgaggcactctccggggccattggcgcttacagacgccaggccgtcgatgccagcctcaaaaacagatggtttgccgctgccgaccgtttcaccgccgcgcccagcgacggcaatgcgctaccgaccgacatgcaggttatcggtgcggtgcagcggcaagcgcgcgaaaattccgttgtcatgtgcgcggcaggcaccatgccgggtgagttgcatcagctctggaaggccgggcgccccatgtcctaccacatggaatatggcttttcctgcatgggctatgagattgccggcggccttggcatcaagatggccgaaccggaccgcgacgtcatcgtgatggtgggcgacggttcctatatgatggccaattcggaactggccaccagcatcatgatggggcagaaaatcaccgtcgtcgtgaccgacaatcgcggtttcggctgcatcagccggctgcaaatggcgaccggcggcgcggaattcaacaatctgctcgaccatgccgcccatgtgaacccgtcgcagatcgattttgccgcgcacgccgccgccatgggtgcggatgcgaaaaaggtcggctccatccgcgaactggagggcgcactggccgaagcacgcgacagcctgcgcacgaccgtcattgttatcgacaccgacccttaccccacgccggaaaccggcggctggtggtgggatgtcgccgtaccggaagtctcggaacgcgatgaggtgcgcgccgcacgcaaaaactatgaagcccagatcaaagaaagaaactga

SEQ ID NO: 529 - DNA, 774 bp, Brucella melitensis
atgaaattcgctcagattctcgcaaccgcaggcatcattcaggcagttcttttcaccggcgcaatggcgggtgaaaatctcgatgccatcaaatcggccggtgtcctgaaaatcggcaccgaaggcacctatgcccccttcacctatcacgacaaggacaacaagcttgttggcttcgacgtggagattggtgaagccatcgccggaaagctcggtgtgaagccggaattcgtggaaggcaaatgggatggcctcattgccggcctcgacgccaaccgctacgacgccgtcatcaatcaggtcggcatcacagaggaacggaagaagaagttcaacttctccaatccctatatcgtttccaaggttgttctcatcgtcaacgataagaatgacacgatcaaggatttcgccgatctgaagggcaagaaggcagcccagtccctcaccagcaattatggccgcctggccaaggaagcaggtgcgaaactggttgcgaccgacggcttcgaccagtcgatccagcttgtccggacaggccgtgccgatgccacgctcaatgacagcctgtcctatctcgacttcaggaagcaccagcccaaggctcccgtcaaggtcgtggcggaaaaggacgaagccaccgcctctggcatcatcgtgcgcaagggcgacgacgagctggtcgccgccatcaacaaggcgctcgatgaaatcaaggccgatggaacctacaacaagatctcgcaaaaatatttcggccaggacgtttccaagtaa

SEQ ID NO: 530 - DNA, 771 bp, Brucella melitensis
atgcgagaaacagattttgtcggaggctttgccaagggattgcgggtcatagaggctttcggagaagacaggccgcgcctgtcgattgccgatgtctcaaaaatcacagggcttgaccgtgctaccgcgcggcgctgccttctgaccctcgcagagcttggctatgccgaatatgatggcaaattcttcatgctgctgccgcgcattctgcggctcggccatgcttatctttccggcacgccgctgccgacaatcatccagccgcacctcgaccgcctttcgcaaagcgtgggagaaagcgcctccgcttccgtgctcgacggggcggagattgtttatatcgcgcgtgcttcgcaaatgcgcgtcatctcgatcaatctcatggcaggaagccgtctgcccgcctattgcgcatcgatgggccgcgttctgctggcttggctggacgaaagcgaagcacgcaccatcctggaacaaaccgaactgcgggcccgcacgcctttcacccagaaagacccggaaaaactgatggaggaactgcgccgcattcgcgcgcagggcttcgcggtcaatgatcaggagcttgaactgggcctgcgctcgattgcggttcccgttttcaatcaccgcggcgcggtcgttgcggcgctcaatattggcgcgcccgtcgcccatgtcgaagtcagcgatctggtcgggcgcatattgccggaaatgctgaaaattcaatcggaattgcgcagcatgttgcggcagcgcctgtttgaatag

SEQ ID NO: 531 - DNA, 1488 bp, Brucella melitensis
ttgacgatgagtgaactgaccgcactgaccattgccgaagcgcgcgacaagttgaaagccaaggccattaccgcgaccgagctgacggacgcctatctttccgctatcgatgccgccaatgacgccatcaatgcctatgtggccgtcacccacgatcaggcgcgttccatggccaaggcttcggatgaacgcatcgcgaagggcgaagcgggcgcattggagggcattccgctcggcgtgaaggacctgtttgcaaccaagggcgtgcacacgcaggcctgctcgcacattctggacggtttcaagccggaatatgaatcgaccgtcaccgccaatttatgggctgatggcgcggtcatgctcggcaagctcaatatggatgagttcgccatgggctcctccaacgaaacttcctattacggtccggtgaaaaatccgtggcgcgccaagggttccaatgccgatctggtgccgggcggctcgtccggcggttcggctgccgccgttgccgcgcatctttgcgcgggcgcgactgcgaccgatacgggcggctcgatccgccagcctgccgcctttaccggtacggtcggcatcaagccaacctatggccgtgtttcgcgctggggtacggtggctttcgcctcgtcgctcgatcaggcaggcccgattgcgcgcgacgtgcgcgatgctgcgatccttatgaagtccatggcttcgctcgatctcaaggacacaacttccgttgacctgccggtgccggattatgaagcagccctcggcaggtctgtgaagggcatgaagatcggcattccaagggaatatcgtgtcgatggcatgccgggcgaaatcgaggaactctggcagaagggcatccagtatctgaaggatgcaggtgccgagattgtcgatatttcgctgccgcataccaaatatgcgctgcctgcttattatatcgtggcgcctgcggaagcttcgtccaacctcgcacgttatgatggcgttcgttatggcctgcgcgtgcccggcaaggatattgccgacatgtacgaacagacccgcgccgcaggcttcggcaaggaggtgaagcgccgcatcatgatcggcacctatgtcctgtcggcgggctattacgacgcttattacctccgcgcccagaaggtgcgtacgctgatcaagaaggatttcgaggacgttttcgccaagggtgtggatgctatcctgaccccggccacgccttcggcggctttcagccttgccgatgaagtcctcgccaacgacccggtcaagatgtacctgaacgatatctttaccgtcaccgtgaacatggcgggattgccgggcatcgcggtgcctgccgggctgaacgggcagggcctgccgcttggcctccagcttatcggccgccccttcgaggaagaaacgctgtttcaggcagcccatgtcatcgagcaggctgccgggcgtttcacgccagcgaagtggtggtaa

SEQ ID NO: 532 - DNA, 2100 bp, Brucella melitensis
atggacgacagcaacgatctcttttcaagagtagtgaacaacgccagggaacggcagatggagcgccaaacgggtgaaaacaccgtggcgcaaccggtcgtgcagccggcaccatccgcgcccaagcctgtgcctgccgctgccaaggcgccgcctgctgcatcaggcggcgacgattacaacgcctcctccatccgcgttcttgaaggcctggagccggtgcgcctgcgccccggcatgtatatcggcggcacggacgaaaaagcactgcaccacctgtttgccgaagtcatcgacaattcgatggacgaagcggttgctggccacgcgaatttcatcgaagtcaccgtggataaggaaggttttgtcaccgtttccgataacgggcgcggcattcccgtggacgagcatccgcaggtgccgggcaaatccacgctcgaagtcatcatgaccaagcttcatgcgggcggaaaattcgacggcaaagcctatgaaacctccggtggcctgcatggcgttggcgtgtcggtggtcaatgcgctttcggatgtgcttgaggtggaagtggcgcgcaatcgccggctttaccgccagtgtttttcacgcggcattccgcagggaggcctcgaagaactgggcgaggttcataatcgccgcggaacgcgggtgcgctttcatcccgacccggaaatttttggcaagaatgcccatttcgacccgcaccggctttatcggatggcgcgctcgaaggcctatctgttcggtggtgtggaaattcgctggaactgcgatccctcgctgctcgaccccaagaaggaaacgccggaaaaggccgttttccactttcccggcgggttgaaggattatctggaggcctcgctcggcaaggaacatcaggttacgcgcgaggtttttgcaggccgcacggagaagcagggcgggcatggcgcggttgaatgggccgttgcatggttcggcggcgatggttttgtccattcctattgcaataccatcccgaccggcgatggcggcacgcatgaagcgggcctgcgcatcgcgctcacgcgcggcctcaaggcctatgcggaactgaccaataacaagcgcgcttctatcatcaccacagacgatgtgatggtgtcggcggctggtatgctgtctgttttcatccgcgagccggaattcgtcggccagaccaaagacaagcttgcgaccgtggaagcacaacgcctcgtggaaaacgcaatccgcgatccgtttgatcactggcttgccgcttccccgcaggaggcttcgcgccttctggaatgggtgatcgaccgtgccgatgaacgcctgcgccgccgtcaggaaaaagagaccgtacgcaagagcgcgacgcgcaaactgcgcctgcccggcaaacttgccgattgcacgcagaatgcggcagcaggtgcggaattgttcatcgtggagggcgattcggctggcggttccgccaagcaggcgcgcaaccgcgccaatcaggccattctgccgctacggggcaagattctgaatgtcgccagtgccggacgcgaaaaactgactgccaaccagcagattgccgatctcgttcaggcgcttggttgcggcacgcggaagaattaccgcgaggatgacctgcgttatgaccgcgtgatcgtgatgaccgacgcggacgtggacggtgcgcatatcgcctcgcttctcattacgttcttctatcaggaaatgccggagctcatccgcaatggccatctctatctggccgtaccgccgctctatcgcctgagccagggcggcaagaccgcctatgctcgcgacgacgcgcataaggaagaactgctgcgcaccgtgttcaccggacgcggcaagatcgaaatcggacgtttcaaggggcttggcgagatgcgcgccgaccagctcaaggaaacgacgatggacccggccaaacgtacgctgttgcgcgttcaggtggatgaggaatatggcgatgagacgcgcaatacggtggatgacctgatggggacaaagccggaagcccgcttccgctttattcaggaccgcgcggccttcgtggaggagctggatatctga

SEQ ID NO: 533 - DNA, 1845 bp, Brucella melitensis
ttgaacagatttattgcttttttccgcagtgtgtttctcattggccttgttgcgacagcctttggcgcgttgcccgcgcgggcggcaaacgagacagcacccgactatgcgctctccatgcatggcgacgtggctttgcctgccgattatacccattttccctacaccaatcccgatgccccgaaaaagggttcgctgaccgtaggcgtggtgggcactttcgacagccttaatccctttgtgctgaaaagtatgcgcaccaccgcgcgcggcctgtataatgatggcgagtttggcaatatggtgtaccagacgctgatgctgcgctcgcgcgatgagccttttacgctctatagtctgctggctgagaaagttgccatcgatcccgagcgcaaatgggtggaattcacgctcaatccaaaagccaaatggtcagatggccagcctgtcacggtggacgatgttctcttcacctatgacatactgaccgaaaagggccgcccgccctataacagccgcatgagccgggtggcgaagatcgaaaagaccggcgaacgctcagtgcgcttcacattcaacgagaaatccgaccgtgagtttccgatgctgatcgcaggctcgatgccggttctgccgaaacatgccatcaaccgcgatacgttcggcaattccacactggaaccgccgatcggcagcggcccctatgtggtcgccagtgtgcagcccggccagcggatcgtctacaagcgcaacccggactattggggcaaggatctgccctcgcagcgcggcttcaacaatttcgacaagatctccatcgaatattaccgcaacgaaacctcgctgtttgaatccttcaaaaagggcattctcgacattttcattgaaggcaatccgatacgctgggaaaagctctatgattttccggcggtcgagcagggcaaggtcatcaaggacactttcgagaagggcacaccggccgatatgctgggcttcgtgttcaacacgcgccgcccgatcttcgctgaccggcgtgtgcgccaggcccttggattgctgttcgattttgagtgggcgaacagcaatctctttgcagggcaatatcgccgtacgcagagcttctgggaggggtcgcaactttcatccgtcggcaggcccgccgatgcgcgcgaaagggagttgctggcccccttccccggtgctgtgcgcgaagacgtgatgaatggcacctggcacccgcccgttacagatggcagcggccatgaccgcgttccggccaagaaggcctatgatcttctaagccaggccggtttccagttcaaggacggcatggccatagatccgaccggtaaaccgtttgccttcgagattatgacgcgatcaccggacgaggagaaaatcgcgctcgcctatcagcgcaacctctcgcgccttggcatagcagttgaaatccacacggtggacgatgcgcaatatcaacagcgcctgcaaaccttcgattatgatatgatcctcggtgcacttgccagttcgctttctcccggcaatgagcaatggttgcggtggggttccgcctcgcgtgatgtgcagggcagcttcaactttgcgggcgtggccgaccctgccgttgatgcgatgatcgaggcgctgcttgccgcgcgcaaccgcgccgatttcgtcagcgccgtgcgtgcactcgaccgtgtgctgatttcaggtgattattatgttccgctctaccacctgccctatcaatgggttgcgcggtgggaccggattgaacatccccaaaaaacaccactttccggctaccaactgccggcatggtggcacacgtcccaataa

SEQ ID NO: 534 - DNA, 1092 bp, Brucella melitensis
gtgcaaacaaggagcacagggatcatgaaaaagacccttatggtaattgctactgtcgcgggctttatgctcggcggggcggcacatgcagaagaaaaactgaaggtgggcttcatctatatcggccctcccggcgatttcggctggacgtaccagcatgatcaggcgcgcaaggagctggtcgaggcgctcggcgacaaggttgaaaccacctttcttgaaaacgtagccgaaggtgcggatgccgagcgctccatcgaacgtcttgcccgcgcaggcaacaagctgatcttcacaacctccttcggttacatggacccgaccgtgaaggtcaccaagaagttcccggacgtgaagtttgaacatgcaaccggctacaagaccgcagacaacatgtccgcctataatgcgcgcttctatgaaggccgttatgtgcagggcgtgattgccgcaaagatgtcgaagaagggcattgccggctatatcggctccgtgccggtgccggaagtcgtgcagggcatcaactccttcatgctgggcgcacagtccgtcaatcctgatttcagggtcaaggtaatctgggtcaattcctggttcgatccgggcaaggaagccgatgccgccaaggcgctgattgatcagggcgtggatatcatcacccagcacacggattccaccgccgccattcaggtggcgcacgaccgcggcatcaaggcgttcggccaggcttcggacatgatcaagtttgcgcctgacacgcagcttaccgctgttgttgacgaatggggtccgtactatatcgaccgcgccaaggctgttcttgacggtacgtggaaaagccagaacatctggtggggtatgaaggaaggcctcgtgaagatggcgcctttcaccaatatgccagatgatgtgaagaagctggcggaagaaaccgaagccaggatcaagtctggtgaactcaatcccttcaccggcccgatcaagaagcaagacggttcggaatggctgaaagcaggcgaaaaggctgatgaccagaccctgcttggcatgaatttctacgttgctggcgtggatgataagctgccgcaataa

SEQ ID NO: 535 - DNA, 2025 bp, Brucella melitensis
atggcggttgccaccagaattggcgacctgactgaggatagcggcacaaatacggctgcagtcagcggcaataccattcgcgcccagacgatcgtgaatgatagttctaatacccttgaaggaaaactgtcggacgactatgcgtcatcaacgttgggtacctcttccttaacctttgggactcctttcggattggaacctcggcatgtaactcagggggcaatcctggcagaaacggcgcagataaacattgcaaccggccataaggcgacggtttccgagggcataataggaacccagaatacggcaaaacaagaggtggccgctggggcaagcctcagtctgcaagaaaatactattgatgcttcgcttgccgtcaacaatgcggcgaacaggattgccatcgacaaggaaggcgatccgactttccaaggctcggtccttattaccaatctgcagcagaacaaagagggctctgttgacgcagaaacgacagagtcgggtatattggcgcaagcgacagaaggagatgttgcgaatgtaatgtctattctgtcgggcagtctgaacgtagcggaaaacattgtttccagttctgcaaccggtaaccagaccgttggtgccgcaggcgccgcaggtcatcagattgtgatcggtggtcaactcagcgtcgatagcaatactaccggaaacggcagttcaacgatatcgcatgacggaggctctgcatttgccgaaaccgccgctgactttgttattgccaataaccaggcaaacatcgttacagatgcggctgatcatttgacaatctccagcgcgtctattggtgtggagggtacaccgacgattggtgcggttgttgatgccgtcgaaggaggttcggttgtcctcgcggataatgccgtgacgtctcaggcggtaggtaacaacacatccgccgcaatcttgaaggatgatgactccgcagtcggctttgatgcaacagctgcccttgctaaccatcagattaatctgttttctgatattgcggcgaccacgcaaaatggctcagtggttgccattgtcggtaaagcgagagacagtatcttcgatgaagggaccgttgatgtttcggggaacaagatttccgcactggcgtttggcaacagcgccagccagcagttggccctggacgccaataacctaaccgctggggatagcactgggttgctgacgggcgggccgaacgacgagactacccatgatagcggccttcgggctaaggcaggtgctatgcttaccagcctacaggcaaactatagcagtgatatttccgccaacaatgcggcgtcggtggttggtgtctacggcgacaacaaggttggtagcgacatatctggagccaaattaaccgtcgagaacaacacgcagcaggcgactgcgattggtagcgacgctactaatctgcttggacaagtgcattatgaggacggcaaggcggatcatgtagccggacttggcggaaacagtgtcgccggttcggccggtattgccaacgttcaggtgggtgatgctggatcgtcggtcattgcttcgttgaccgatgcggtcgcaggattcccaggaatcagcagtagggctcccataacgctaccgttttttaatgccaacgttaaacaggaggaatccagcttttcggtaaccgacaatgtgcagagcgcctcagccagcggcacccagagccgcaatgaactggtggtcgagagcaattccgtcactgccaatattggaactggtgctcaagagcatcccacttcatcaaataccggtcttgacggagcgtatgtacgcgataacgaagatagtttccataccattcatcagcctatgatcatggcggcctatggccttatcaacgatcagtcgattggggggagagtcaatgccctagaacctgtctgcattcaaggattcccttttgtacgaaattctgattcaaggttgttaaaggagaacagccgtgagcagacgaagccttacagatga

SEQ ID NO: 536 - DNA, 1578 bp, Brucella melitensis
atggttcgcgaaattttgatgacaggcatttgccttctggcgttgaacagtgccgcatcggcacaaacagtgctcaaccggggtaacgataccgatcccgcgacactggatcagcaccatacttcgaccgtttccgaaaaccgcgttctccgcgacctttatgaaggtcttctggcgcaaaatgccaagggcgaagccattccgggcgctgcctcctcttgggatatttcggaagacggcaaggtctatacctttcatatgcgcgacggcgcaaaatggtcaaacggtgatccggtgacggctggcgacttcgagttctcgttccgccgcatcatggacccgaagacggcagccggttatgcaagcgttctttatgccatccagaatggcgaagaagttgcaaccggaaaaatgccggtggaccagcttggcgtgaaggcgctggacgacaagacactccagatcacgttgaaaagccctgccccttattttcttgagcttctgacgcaccagaccggctttccggtcaacaagaaagctgtcgagaagtttggtgacaagttcacccttcccggcaatctcgtgatcaatggcccttaccagcttgtcagcttcgtaccgaatgacaagatcgtcatgaaaaagaacccgaactactgggatgccgagaacgtcaagatcgacacggtcaactggatgccctttgaagaccggtcgagctgtatgcgccgctttgaggcaaaggaagtggatatctgctccgatgtttctgccgagcagatggactatgtgaagaagaacctttccaaggaattccgcctcgcgccctatcttggcatttattacgtggacattaagggcgagccttccagcaaactgcgcgatccgcgtgtgcgccgcgccatttctctggccgcggaccgggaattcatggcggatgaggtctggcgtggcgtcatgctgcccgcctattccatggtgccgcccggcatcgccaattacgtgaaggatgcaccgaagctcgactttgccaatgaagacattctcgaccgcgaagacaaggcgaaggagcttttgaaggaagcaggcgtggagcccaatacgctgtcggtgacgctgcgctacaacacatcggaaaatcacaagaatacgatggcagcctttgccaacatgctgaaaaacatcggcatcaatgccaagctggatgaggtcgaaggcacgacctatttcaactatcttcaggaaaaaggcatgttcgacctgacccgtgacggctggatcggagattataacgatccgaattcgttcctggaactttatacaaccggcaattatttcaattatgccgaatggtcgaacaaggattacgatgcgctgatggataaatctgctgtcacgaccgatctcgccgaacgtgcgaagatcctggctgaggcagaagagattctcctgaaggaaggggctatcgtgccattgatgtattattcgtcgaccgcattggttgccgacagggttcaaggttacgacgataacctcatgaactcgcacggcacgcgctggctatccgtcaagaactaa

SEQ ID NO: 537 - DNA, 978 bp, Brucella melitensis
ttgtgggcttggcagttgccgccgttcaaacacagtgtcgaaacgaccgacaatgcctatgtgcgcgggcaggtgacggttatgagcccgcaggtttcaggctatataaccaaagtcaacgtgaccgattacgagcaggtcaaaaaaggcgatctgctttttgagatcgatagccgcagctatcagcaaaagctggatcaggcgcttgccgcgttggacagcaagaaggcggcacttgccaattcggagcagagccagcgttccgccgaggcaacgataaaggcgcgagaagcccagatatcgggggcaaaggcggcgcttgaagtggcaaaagccaatacggttcgtgtcgatgccctgttgccgcgcggtgtgacgacacaaagctctgccgatacggcacatggcaatatgcttcaggcgcaggctgcggtcgatcaggccgaagcggcactggccgttgcgaaggaggatttgcgcaccatcatcgtcgcgcgtgaagggctcaatgccgacctgcacaatgcagaggctgcggtggcgctggccaggatcgacctccagaacacgaagatccttgctccaagggatggcaagcttggcgaagtcggtgtgcggcttggccaatatgtcaccgcaggcacacagcttgtttcgctcgtgccggccgtcaaatggatcatggccaatttcaaggaaacgcaactttatggcatgaaggtcggccagccggttacgctgacggtcgatgcgctccgccatgcggaactgaaggggcatatcgaggctttttcaccggcaaccggctctgaattcagcgtcatcaaatccgacaatgcgaccggcaatttcaccaagatcacgcagcgcttgtctgtccgcatttccatcgacgaagggcagccggatgctgaattgctggcgcccggcatgtcggtggtggtgcgtgtcgatactgcctccacgccggataaataa

SEQ ID NO: 538 - DNA, 1179 bp, Brucella melitensis
ttgctggcgacaggtggtctggcggctgcggatggaaatatttatcgcgtcggtgcgaatgatgttttgcaggtgacggtctatgggcagcccgcactgaccgggctttatccggtcgatgtggatgggaatatcggttatccggtggttggaaacatctccgtgcaggggctgaccacgctgcaaatcagtgagaagattgcctcctccctttcccagcatattccgggtctgactgtcaccgcgacgatcaatcaatatgcgccggtgtttgtgatgggggacgtcaaagcccccggcaagtacgaatttcgccccggcatggtggcgcttgaattgatggctctgggtggtggcgcgggaaagggcgaagcaccttccgttaccgctggaatgcagcttatttccgcgcagcaggaatatgccgatttgcaaatgcagataacggcgcagaccatccgccgcgcgcggtttgaggctgagttgaagggcacggatttcacctatgccgtgccggagcaaacggcagccaacaaggacatggtcgcgctgacccggcatatggtggaaggcgagcgaaccctgttcgatatgcgtcgcaacaatcttgccgccgagcgtcgggcgctggaagcacaggctgcaagctacggcgatgaaatcacgaccttgcaacaaagcatcaagctgcatgacacggaaatccagcttttgcaggaaaacgtaaattccagcaaatcgctggtggatcgtgggcttgctgccaaatcaagcctgcgggacatggagcgcgacctgtcatccacccggcgcgatgcgctggaactggcctcgtttctggcccgtgcacggcagaaccagcttgcagttgagcagcgtattgccaatctggatgaaacccgccgaagcgaggcggccagcagtttgcaggaaattgatctcaacatggcgcggatgcagcggcgcagcaattcccagcttgaggccatggcggagatcgccaaatcctccggccagatttcctctgccgatatgcgccgcaagctgattttcaccatcagccgcaatgtaaatggggcctatcaggaaattgcggccaatgaacgaacagaaatcaagcccggcgatattctgcgtatcgagcttgatatgagcaaacttggcggctcgccatcatag

SEQ ID NO: 539 - DNA, 2190 bp, Brucella melitensis
gtgattatctccgacgtttcatcagcaaacgggcggcagccggttgccgacctgcttgagaccatcaaacgcagaaaactcatgctgacactgccgatcatcgcgggtgtgggcgtcggctttgccggttatctgacagcgccggtgagttatgtttcggaatccgtgctggtgctggacatgcggcgcttgcaggccttgccgaacgaaagtgccatcacgccgctgccgcaggacagtcccgtcctgcgctcggaactggacatcatcaattcacgcatgatggcgcaaaaggtcatcgaacttttgcaggcggagaatatcgccgtgccgacggacgtgcattcacgcacggttctgtcatcgcaacctgacaggatcaccctgtcgaagaatgcgcgcgatttcgatccggcagtacgtgagcgccagcagattgacctgcttttgtcccgcctgcgggtgagtaatgacgggcgctccttcacgatcttcatttcctatcgcgcgccggacccggtttacgcggccagggtcgccaatgcttttgcgacggcctatctgaaccatcaggtggatgtgcagcaatcagcagcacggcgtgtcagcgagtggctgggtgagaagctcgtcaccttgcgcaatgatctggaaacggcggaacgggttgcggaagatttccggcagaagtcacgccttgcgggcgagcaggggcagatatcgtttcaggcgcaacgtgtgatggcgctgaatacggagattgtcgccgcaaccggcgcagtatccaccgcgcaggcaaggctgcaaaccgcacaggcgttgaaaaacaacaatgaagcgccagccatgacggagatactggcttcgcccgcaatccagaacctgcgcaatgaagaagcgcgggtgcaacgccatctcgatgagttgaaggcgaacggcgctttgaaaagcgcggaaattccggttcttatggcagaacgggagtcgttgaagcagcagatcactgcacaggtggacgagattatcaaaagcctcagcaatgaaatcaggattgccgtgcaaaggcggaccagcctggagaaagaactgaaagaggcggaaacggatctcgccaaggccaatcaggcacaggtgcgcgcagcgcagcttgatcgtgaggccaatgccagccgcgtcgtctatgaaacttatctgacgcgctacaagcagttgatcgagcaggacggcattgccataccggaggcgcaactgatttcgcaagctgaaccggccatggcaaaggcaagccccaggctgattaactggcttctggtcgggcttgggcttggcggcttgtttgccgttgcaggcacgatgcttcgggaggctttggacaagatcaggccagcccagacgaccgcgcttgcgctgccgggcatcccggcggcaaccttgctgccggtctcaccccaactgaccgtgccaatactcgtcaatcgcggtgttgattcggcaagcccctttggccgggctatcaaatcggtgcatgatcggctgcgcgcgctcatacgtggccgcgattcactggcgctttccgtggtgtcgctttcggaaggcgacggcaagggcctgctggttacggcgctggcgcagcagattgcggcaaccggtgttccggttgctgttatcgacacgacttgcggaaaatcgggcttaggggaggcgttcggcctgccggtaggcaacatgcagtctttgatcggccgtaaactgaatggtgcggcgcttatccacgatcatggttccggcattgatttcattacgcctaacagacaggcgcaggaaggcgaatggctgggcgaattaatcgcgcaattgcggcctgaccacaggattatccttgtgaaccttccttcatatgcagaagacaagcgctccgcgcttatgacgcgcgcaactgacacggcgcttcttgtcgtcaatgcggatcgccgcgatgccaaagcaaccgcggctatggtgcaagtgcttgcatccttcgggcgcaaaccggccttggcggtggtcagccagatggcgtcgccttacgccgggtggattggaaaacacattgtggcccatggctgggcagagcggatcggcgcgcatttgcgcgcaatccgggtgagggggcgcgaagccccgtccaccccgatggaagaacaggcatag

SEQ ID NO: 540 - DNA, 1260 bp, Brucella melitensis
atgcggaaagcggcccgaaacacaaataattctttgagggagaaaagaatgagactgtccaggctccttatcggcgcatcgctcggcgttgcgctttcgtccactgtcttcaccgcggcactcgccgatgtgaaattcggctcgctttatccgatcagcggttcgcttgcgcttctgggtgaagaaagcgcacgcggtctggaacttgccgtagacgaggtcaatgcggctggcggcatcaagggtgaaaaagtcgtgcttgagcgcggcgatgccgttgacaacaaccaggctaccggtgaggctcgccgcctgatctcgcttgtgggtgtgaaggcgattttcgggacttattcttcggcgcgggttattgccgcctcgcaggtgagcgagcttgcaggcataccctatttcgaaatgggtgccgttgccgacgaggtgacggggcgtggcttgcaatatcttttccgcaccaatccgaccgcggaaaacatggccaaggactctgtagatatgctcatcaagggcattgctccgggcctcggcaaagaccccaaggatatgaaaatcggcattatttatgaggactcttcctatggcacatccgttgccgggcatcaggaagataacgcaaaggcagccggtctcactgtcgttctgaaatccggctatccatccaacacagtcgacatgtcttcgctggttctggagctgcgcgagaagggtgcggatgtcgtcatgcagacgtcctaccagaacgattccgtcctgttcctgcaacaggccaacgaagcgggctataagccccttgccatcatcggcggtggcggcggttattccatgcagccaacggcggacgccgtgggacatgacctgatcgacggcgttttcgatgccgactatacgcaatatgcagtcaacacctccgccacgccgggcctgaccgaatttgtggaagcctataaggccaaatatggctcgcaaccgcgttccggccattcgctgaccaattatgtcggggcgaaggcgatttttcaggctttgaacgctggggaaggctttgaaccggaccagatcgtaagcgcagtcaaggcactggacattccggacggccaggcggcagcaggctatggggtcaagtttggcaagaacaaccagaatgagcgtgcgacgatgatggggatgcagtggcaggatggcaagctcgttaccgtctatccggaaaatgccgctatcgccaagatgcgcttcaagaaatga

SEQ ID NO: 541 - DNA, 1392 bp, Brucella melitensis
atgagtctactcctcgaccgcctgaacttcctggcacgcaggaatgtcggcaccttctcggaagggcacggcgtcaccaccaatgaaagccgtgattgggaagacgcctatcgcaaacgctggcagcacgacaagatcgtgcgctccacccatggcgtgaactgcaccggctcctgctcgtggaagatctatgtcaagggcggcatcatcacctgggaaacccagcagaccgactatccgcgcacccgcgcggatctgccgaaccacgaaccgcgcggctgtccgcgcggggcgagctatagctggtacatctactcggccaaccgcgtgaaatatccgctgatccgctcgcgcctgctgaagctgtggcgcaaggaacgcgcggtgaagacgccggtggccgcatgggctgccatccagcaggacccggccaagcgttccgattatatgaaggtgcgcggcctcggcggctttgtgcgggcgacatgggatgaggtcaacgagatcatcgccgccgccaacgcctatacgaccaagacctatggccctgaccgcgtggttggcttctcgccgatcccggccatgtcgatggtttcctatgcggcgggctcgcgttatctgtcgctgctcggcggcgtctgcatgtccttctacgactggtattgcgatcttccgcctgcttcgcccatgacctggggcgagcagacagacgtgccggaatcggcagactggtacaatgccggtttcctcatgctgtggggctccaacgttccgcagacccgcacgcccgacgcgcatttctatactgaagcccgctacaagggcgcaaagtcggtcgtcgtctgccccgactattcggaagccgccaagttctccgatctctggctgcacccgaagcagggcaccgatgccgcccttgccatggctttcggccatgtcatgctgcgcgaatatcacctcgaccggcaggtgccctatttcgaggattattgccgcaaatattccgacttcccgatgctggtcatgctcacgaagaaggacggccactacgtgccgggcccgtttcgtgcgtgcatccgacttcgccgacaatctgggcgaaggcaacaatccggactggaaaacggtcggcttcgacaccaagtccggcgcctatgtcgctccgacagggttccatcggcttccgctggggcgatgatggcaagtggaacctggaagaaaaggacggcaagggcaaggatgtggaacttgccaagagcttcatcgacaaggacgcacatgatgccgttgccgatgtggccttcccttatttcggcaatctcgaccatgaacatttcgagggcaccgatcatgacagcatcctcgtgcgcaaggttcccgcccgcacgctga

SEQ ID NO: 542 - DNA, 1131 bp, Brucella melitensis
atggccgaccagatacaagtcaatcgtcgcacgatattggcgggggctgcccttgccggtgctttggggcctgttctatcggcgacgtcggcctgggggcaggggacaatgaggaaggccagcgcagaggaaattgctgcgctgccgagacagaaagtggagctggtcgatcctcccttcgtccatgcacacactcaggttgccgaaggcggcccgaaggtggttcagttcaccatggtgatcgaggaaaagaagatcgtcattgatgatgcgggcacggaagtccatgccatgactttcaacgggacggtgcccggaccgctcatggtcgtgcatcaggacgattatctcgaactgacgctcattaacccggaaaccaataccctgttgcacaacatcgatttccatgcggcaaccggcgcactgggtggtggcgggctgacggagatcaatccgggcgagaagaccgtcctgcgcttcaaagccaccaaacctggcgtctttgtctatcactgcgcacctcccggaatggttccgtggcacgtggtatcgggcatgaacggcgctgtcatggttctgccgcgcgaggggctgcatgacggcaagggcaacaagctgacctatgacaaggtctattatgtcggcgagcaggatttctatgtcccgcgtgatgagaacggcaattacaagacctatgaagcgccgggcgatgcctatgaggatacggtcaaggtgatgcgcaccctgacgccgacccatgtggtcttcaatggtgcggtgggtgctcttacgggtgacaaggccctgacggcgaaagtcggcgaaaaggtgctgatcatccactcgcaagccaaccgcgatacccgtccgcacctgatcggcgggcatggcgattatgtctgggcgaccggcaagttcaatacgccgccagatgtcgaccaggaaacctggttcattccgggcggtgcggcagcggcagccttctacacgttccggcagccgggcatctacgcctatgtcaatcataacctgatcgaagcctttgagctgggcgcggcagcccacttcaaggtgacgggcgaatggaatgacgacttgatgacatcgatactggcgccgtcggggatgtag

SEQ ID NO: 543 - DNA, 834 bp, Brucella melitensis
atgaacttcgggggcgctctcctgacagcagatgtcaggagatgcgacgggcaaccgcgccagcctggtgagcggcgcaaagatagacggatcaaaaccatgaaaccacgtcatcttcttttgatcggatcactgacggcaatcgccgtctccatcgtcagcaccggcatggcctttgccgatgaccgttattccgatctgccgcctgtgcgcgtgagccaggcgatttccgcaccatgggtcgcgcagttgcaggacgcacaggcccggccacgcatcgcacggcaggaaacaagaaaaaccaaaacgcactataacaaggtttcttaccagcgcccggcgacaaacccggcaaccacggcacgcaagaagcagtttgacccgatctatctgccgcagatcgtttcctactcgggcaaggaaaagcccggcaccatcgtcatcgatacggccagccgttttctctatctggtacaggccgacggcaaggcacgccgctacggtgtcggcgtcggcaagcaggggttcagctggaaaggcacacagcgcatcagccgcaaggccgaatggcccacatggacgccgcccagtgaaatgattgcccgcgagcgcaagaagggccgtttcctgcccgcacgcatggatggcgggatcaacaatccgctcggcgcccgcgcgctttatctgggttcaaccctctaccgcatccatggcaccaaccagccgtggaccattggcaaggccatgtcctcgggctgcattcgtatgcgtaacgaggatgtgaccgacctttacgaacgcacaccggtgggaacccgcgtggtggtccgctga

SEQ ID NO: 544 - DNA, 462 bp, Brucella melitensis
atgagcttgttgctggctaacgtgctttccacattgatggctcttgcctcgcttgcggctttgatcgtggtgggccgcaaggccaatgaaaccatcaggctcggcaaggtgctggcgctgcgcgtcgccgccgcgtcaaacggtctggagcgcgccgtaaaggcgatccgcaacgaacgtaccgaccttaccgacgccagcgccaagcttgacgcccgccttgccgaaacgcagcgcgtgcgccgtgaaatggacgaggcgatcgaggaattgaaccggctgcgcaaggcgctctcgcgcgatatgcgccaggcgtgcatcttggccgaaacgccgccaccccggcaggagaaaaccccgtccgccgcagaacaaccgctccccgcagacaagaacgcgctgcccgttttcgtgcgccgcgcggtcaagaaggcaaccgttgaactggcgggacaggcatga

SEQ ID NO: 545 - DNA, 1218 bp, Brucella melitensis
atgtccgccccgaaatccgttgataaagctgatattcgtccatttccgaccgccaaaaccgttgcgccgctccatcagcctgcaacgaatgaagcgcctgccaatgaaagaacgcagccccacgccgttccggacgaagccgtatccgccaagggcggcgcgaagaaaggcttcggcaagcgcgtcgacctgcccagccttgtagccgtcgctgccataggcgcgctctggtatggctataactggtggaccgtcgggcgcttcatggtttcgacagacgatgcctatgttcagggcgacattgcctccatcgcacccaaggtcaccggctatattgaaaacatccccgtagccgcaaaccagcaggtcaaggccggcgatgtgatcttccagttcgatgcgggcgactatcagatcgcgcttgacgaagccaatgccaagctggccacgcaaaaagaaacgctcatccgcatccaggcccagaccgatgccgccaaggccgcgctgttgcaggcaaatgccgatcagcaggcggccaaggccgtgctgctcaacgcgcagagcaccatggctcgcgtgcagaagctgcatgaaacccgtttcgtcgcgcaatccgaactcgacaatgcccagtccgccctggaccaggcccgcgccaggctggccggggtagatgcgcaaattgcatccgccaaggccaatatttccgttctcgaagcgcaatataatgaagcggcaagctctactaaatcgctggaacttgcccgcgataaggctgcacgcgatctttcgtttacgagcctgcgcgcgcctttcgacggtgtgatcggcaatctttccggcaagaagggcgacctcgttgcccccggccagaagatcgcggcgctcgtgccggtcgaccagctttatatcgatgcgaatttcaaggaaacccaactcgcccacatcaaggttggcgagacggcgcatatctatgtcgatgcgatcgacggcacgaagtttgacggcaaggtagcctccattgctccggcttccggtgcggtgttctcgctactgccgccggaaaacgccaccgggaatttcaccaaggtcgtgcagcgcgttccggttcgcatcaccattccgaaagaagcatttgaatccggcaagatccgtgcgggcctcagcgtcattgttgacgtggacacgcgcaccgcgccggaccagacggcaaactga

SEQ ID NO: 546 - DNA, 1182 bp, Borrelia burgdorferi
atgtcaataaaaacagtaaaagactttagtagctttgcgggcaagcgagctttagtaagatgtgattttaatgttcccctaaaagaggggagcattagcgatgatactagaattagggcagcattgtctacaatagagtatctaaaagaaagaggagctaggattgtgcttgtaagtcatttgggtagaccagatggaaagaaaaatcctaaatattctcttaagccggttgccaataggttgtcagagcttttaggccaagatgtcaagatgctttctgattgtattggaagtgaggttgtaaatagtaccttgcaaatgaaggatggggatgttgtattgcttgaaaatgtaaggttttatgcagaagaagagaaaaacgataaaaattttgcaaaaaaactttctgaaaatggagatgtttttgtaaatgatgcttttggcgcagctcatagagctcatgcttcaactgtgggagttgctgattatttgccgtctgttggtggatttttaatggaaaaagaagataaatttcttggtggaatattaaaaaatcccgaaaggccatttgtttcaattattggtggttctaaggtttcttcaaagattgcggtactagaatcacttttgtcaaagtctaatgtagttgtgattggcggtggaatggcttatacttttttgcattccgaaggatattctataggcaaatctcttttagaggacgaatatattggtatagcatcttcttttttaaagaaagcaaaagagctgggcgttaaagtaattttaccacttgatcatattgtagctgatgattttaacaaaaattcaattcctgagtatattgactcctttaatattcctgaaaacaagattggcatggatattggagctaatactttaaaagaaattgaaaatgttgtgaaaactgccaaaactataatttggaatggtcctcttggtgtatttgaatttgattcattttcaaaagggactgctaaggttgccgaaatggtagcatcttgctcaggtttaaccgttgttggtggtggagattctgttgcagctgttaataaatttaatttatctgataagattactcatgtttcaacgggcggtggtgcatcgcttgaatatcttgaagggagaattttgccgggtattaaggttttggagaattaa

SEQ ID NO: 547 - DNA, 1011 bp, Borrelia burgdorferi
atgattatcaatcataatacatcagctattaatgcttcaagaaataatggcattaacgctgctaatcttagtaaaactcaagaaaagctttctagtgggtacagaattaatcgagcttctgatgatgctgctggcatgggagtttctggtaagattaatgctcaaataagaggtttgtcacaagcttctagaaatacttcaaaggctattaattttattcagacaacagaagggaatttaaatgaagtagaaaaagtcttagtaagaatgaaggaattggcagttcaatcaggtaacggcacatattcagatgcagacagaggttctatacaaattgaaatagagcaacttacagacgaaattaatagaattgctgatcaagctcaatataaccaaatgcacatgttatcaaacaaatctgcttctcaaaatgtaagaacagctgaagagcttggaatgcagcctgcaaaaattaacacaccagcatcactttcagggtctcaagcgtcttggactttaagagttcatgttggagcaaaccaagatgaagctattgctgtaaatatttatgcagctaatgttgcaaatcttttctctggtgagggagctcaaactgctcaggctgcaccggttcaagagggtgttcaacaggaaggagctcaacagccagcacctgctacagcaccttctcaaggcggagttaattctcctgttaatgttacaactacagttgatgctaatacatcacttgctaaaattgaaaatgctattagaatgataagtgatcaaagggcaaatttaggtgctttccaaaatagacttgaatctataaagaatagtactgagtatgcaattgaaaatctaaaagcatcttatgctcaaataaaagatgctacaatgacagatgaggttgtagcagcaacaactaatagtattttaacacaatctgcaatggcaatgattgcgcaggctaatcaagttccccaatatgttttgtcattgcttagataa

SEQ ID NO: 548 - DNA, 1884 bp, Borrelia burgdorferi
gtggattcaacattttcaggaatagaaattggcaaaagaagtttatttgcacataaagatgctatgaatacagttgggcacaatttatccaatgctacaaagcctggatattcaaggcaaagagtaacaatgaaaaccgaaattcctctttatgctccacaattaaacagagccaaaaaacaaggacaattgggacaggggattgttgttcaatctatagacagagtaaaagatgaactacttaacacaagaatcattgaagaatcgcaccgactaggatactggacttcacaagacaagtttatatcaatattagaagatgtttataacgaacctgaggatcaatcaataagaaaaagattaaatgatttttgggaaagttggcacgatctagcaaatcaaccacaaggtttagcagaaagaaaaataattctagaaagaggcaaatctttttgtgaaggaataagaaatagattccattcgcttgaaagaatttacataatggcaaacgatgaaataaaaattacaacggatgaggcaaacaattacattagaaacattgcaaatcttaataaacaaatttcaaaatctcaagcaatgaaagacaatccaaatgacttaatggatgcaagagacttaatggttgaaaaattaggcaatataataagtgtatcaattgaaaacaaacaagatcccaatgaatttttaatccacgcagaaggaagacatcttgtacaaggttcaattgcaaatgaattcaaactagaagctacaaacgggcccaccagaactagatggaacattttatgggcaaataatgacaaagcttaccttaaaacgggaaagctgggatctttgcttaacataagagatgaagagattaaaaacgaaatcaatgaactaaataatatagctgccaacattatagaaattgttaatgaaatacatgaagcaggacgtggaatggataaaaaaaatggaagaagttttttttctcaagaactaaaactaactgatgatcgaggtagatatgatactaacggaaatggtcagtttgattccgttcatattttcaaaattaacagcacaaatgaaatatttccagaagaaaaattgggattttacggaactcttaaatttgaagctacaaatagtaatgaaattgtagaaataccctacaatgctccagatacagttcaagatgtaataaatagaataaataattccaacgcacaagttacagcaagaattaactcagaaggcaagcttgaaatcaaagcagttaaagaacaagaagatgagaatataacatttaaaatcaaacatatagaagattctggatcatttctaacaaaatatacaggaatattaaatgcatctggacctgagggagcttatgattataaaaatattgacacaacagacaaattggcgcctaaatcgacttattcaatctctcctctaaaaaatcctgcagcatggataaaagttgcagacataatagactcagatccttcaaaaatagcatcgggaattaaaaatccaacaaatgaaatatctattggagataaccaagcagcactaagaatctcctcttttggaaattctcagattatgattggcaaaaatttaacattaaatgattactttgcaaatacagcatcaaatatagcaataaaaggacaaatttcagaaatcacaaaagaaagccaatctcaaatattaaaagatttaacagatctaagaatgtctatttctggagtaaacaaagatgaagaacttgcaaacatgatcgaatttcaacaagcatttattgcagcaagtaaatttatcactgtttctgttgaactaatagacacagtaataaataaaatgggagtataa

SEQ ID NO: 549 - DNA, 843 bp, Borrelia burgdorferi
ttgatgaaaaaagttattatcttaatttttatgctatcaacaagtttattatacaactgtaaaaatcaagacaatgaaaaaattgtatcaattggaggatctacaactgtaagcccaatactagacgaaatgattttaagatataataaaataaacaataatactaaagtaacatacgatgcacaaggaagtagtgttggcataaacgggctatttaacaaaatatataaaatagcaatatcatcaagagatttaacaaaagaagaaattgaacaaggggcaaaagaaactgtatttgcttatgatgctttaattttcattacaagccctgaaataaaaattacaaatattacagaagaaaatctagctaaaatactaaatggagaaattcaaaattggaaacaagtgggaggtcctgatgctaaaatcaactttatcaatcgagactcttcttctggttcttattcgtctataaaagacctacttcttaataaaatattcaaaactcacgaagaagctcaatttagacaagacggaatagtggtaaaatctaatggagaggtaattgaaaaaacaagccttactccccactcaataggatatataggtcttggatacgcaaaaaattcaatagaaaagggtttgaatattctttctgttaacagcacatatcctacaaaagaaacaataaatagcaataaatacaccattaaaagaaatttaataatagttacaaataacaaatacgaggataaaagcgtaactcaatttattgatttcatgacaagctcaactggacaagatattgttgaagaacaaggctttttagggataaaaacataa

SEQ ID NO: 550 - DNA, 537 bp, Borrelia burgdorferi
atgcctaataaagacgatgacaatttagatatgggggattccaatgttagtagaaaaggcggtttattgcctgatattataataaaaattttacaaatacttgcaataggaatatttactgttgcaataatgataattgtttcttattttgtgtctaaaatggtggtaagccaaagtggagctcctagtgattttccagttttttctaatgaatacttaggaaagccacctatgcttatatggtatgaaagtatagatgagattagaggtaacaccttagatgttcctccaaaaacttttgttgtaaagcttgctttggggtatgcagaaaataatgttaatattctcaatgagcttggaagacagaaagtgcgcttaaaagacattattagagaatattttagtcaaagaactggtcaagaaataaagaatgaaagtcaaataaaagcagaaattaaggcaagaattaatagcattcttagaaatggagaaataaaagaaatagcattaacccaaattgatatttttgatatgtaa

SEQ ID NO: 551 - DNA, 1329 bp, Borrelia burgdorferi
atgatgaggtctttatattctggtgtttctgggcttcagaatcatcaaacaagaatggatgttgttggtaacaatatcgccaatgtaaatacaattggctttaaaaagggaagagtaaattttcaagatatgatatcgcaatctatttctggagcttctcgccctactgatgctcgtggtgggactaatcccaagcaagttggattaggcatgaatgttgcctcaattgacactattcacactcaaggagcttttcaaagcactcaaaaagcatctgatcttggagttagtggcaacggattttttattttaaaagaaggtaaaaatttgttttatacaagagccggtgcttttgacgtggactctgatcgacatcttgtaaatcctgcaaatggaatgcgaattcaaggttggatggcaagagatttagaaggtgaaaaggttataaatacagcttctgatattgaggatctgattattccgattggagataaagagggagcaaagtctacgaaaaatgttacttttgcttgtaatcttgataagagattgcccttaattcaagaaggtgcgaatcctgcagatattgcacgcggaacttgggttgtcaataaatcattgtatgacagttttggaaatgttagtgttcttgagcttagagttgtaaaagatttaaatacgcctaatttatggaatgcaacagtattaataaatggtgagcaaaattcaaattttacacttgggtttgacaatgaaggagcattggcgtctttaaatggtcaaccagggcaaaaaggagatattcttcaaattcctataacatttaatgttttgggtgcaaatgtaggtgaagttggtgagcagcaaactgtaaatttgaaattgggaacagttggaagttacactgattcaattactcagtttgctgattctagtagcacaaaggctattattcaagatggatatggcatgggatatatggaaaattatgaaattgatcaaaatggtgttatagttggcatttattcaaatggcataagacgagatcttggcaagattgctcttgcttcttttatgaatcccggaggacttgcaaaatcaggcgatactaattttgtagaaacaagcaattcaggtcaagttagaataggcgaaactggacttgctggacttggtgatattagatctggtgttttagaaatggccaatgttgatcttgcagagcaatttacagatatgatagtgacccaaagaggatttcaggcaaatgccaaaaccattaccacttctgatcaattattacaagaacttgtaagattgaaaaattaa

SEQ ID NO: 552 - DNA, 1134 bp, Borrelia burgdorferi
atgaatataaagaataaattaatatcgctgctaattgtagtagcaatctcttttatcgcatgcaaaacgcctccagaatcaagagagagtaaaaatgctaaaattgcacaaccagataataaaaattttcaattaagagatataaaagacattaaaaatgaactaataagagaacggggacatcttttttattccaaagagtttaatgaagctgaaagattagaagaagcaatgaaacaaagtttttccaaaaaaaaagcaatagaaggaaatgaaattgctctaaaagtacttgaaagatacaaaacaataataagagaaacgagggaaaaaaaagaaaaaacaaattaccttaaagaaaatattgaaaagtatctaaacgatgcagaagcaaatgaagcatacatatggatcccgctggaaatcgacgaagtaaataatttatattttgaagcaacaagaaaatataaaaattacgatcttgataatgcccttgacatgtatagcaaggcctttaacagagcacaacaagcagcaaaaaatgccaaagaagctaaagctttaaaagaaactgatgagagaatgtacaaacaattaaaagcacttgaagcggcttccaacttaccaatttatagcaataataagcttataaagccatctccatggaatggtagagcattcattaaagaaagaaacagtcacttaaaccttttaaatactaataaagacacttatcttcttggagaagcagaaatttcaattccaatagtactcgcatacgaagaaaaagtggaaatagcaaaaaactccaaacctcaagaacaattcaaaacgctagaacttattgaaagatctagaacattgtgggaaaaaggggttgaggctaaaaatgtaaaaaactttagacttgccaatgaattatttttagaatctgcaagataccttgaagcttatcaaagcaatgcaagcagcgagctttacgtaataaaaataggcaataccctatggggcatttccaaaaaattatacaacgatccttacttatggccaaaaatttggtttgccaacagacaaaaaatacaaaatccggatctaattcattctaactggaagataataattcctgccaaataa

SEQ ID NO: 553 - DNA, 1587 bp, Borrelia burgdorferi
atgaaattacaaaggtcattatttttaataatattttttctaacttttctttgttgtaataacaaggaaagaaaagaaggagtatcatttaaaataagcttgggagcagagccaagcagtcttgaccctcaattagcagaggataatgtcgcatcaaaaatgattgacacaatgtttagagggattgttacaggagatcctaatacagggggaaataaaccgggacttgcaaaagggtgggatatttcttctgatggaacagtttacacatttaacctaagagaaaaaatcacttggagtgacggagttgcaatcactgcagaaggaattagaaaatcttatcttagaattttaaataaagaaactggctcaaagtacgttgaaatggttaaatcggtaattaaaaatggtcaaaaatattttgatggacaagtgactgactctgaacttggaattagagcgattgatgaaaaaacattagaaataacactggaatcaccaaaaccttattttattgatatgttagtacaccaatcatttattccagtaccagttcatgttaccgaaaagtatggacaaaactggacaagccccgaaaacatggtgacaagtggtccttttaaattaaaagaaagaattcctaacgaaaaatatgtctttgaaaaaaataacaaatactacgactcaaatgaagtagaattagaagagattacattttacacaacaaatgacagctcaacagcgtataaaatgtatgaaaatgaagagctagatgcaatttttggttccatacccccagatctaatcaaaaatctaaaattaagaagcgactattactcatcagctgttaatgccatatacttttacgcgttcaatacacacatcaaaccacttgacaacgttaaaattagaaaagccttaactcttgctattgacagagaaacgcttacatataaagttcttgacaacgggactacccctacaagaagagcaactcccaactttagttcatattcttatgcaaaaagtttagaattatttaatcctgaaattgcaaaaacccttctagctgaagctggatatcctaatggcaatggatttccaattttaaaattaaaatacaatacaaacgaagcaaataaaaaaatttgtgaatttattcaaaaccaatggaaaaaaaatttaaatattgatgtggaacttgaaaacgaagaatggacaacatacttaaacactaaggcaaatggaaattatgaaatagcaagagcaggatggataggcgattatgctgatcctttgacatttttaagcatattcacacaaggatacacacaattctcatctcataattactcaaacccagaatacaacgaacttataaagaaatccgaccttgagcttgatccaataaaaagacaagacattttaagacaagcagaagagataattattgaaaaagattttccaatagcaccaatatacatatatgggaacagttaccttttcagaaatgacaaatggacagggtggaacaccaatattttagaaagatttgatttatctcagctaaaattaaaaaataaataa

SEQ ID NO: 554 - DNA, 1302 bp, Borrelia burgdorferi
atgggttttcacatttatgaaatcaaagccagacaaatcattgattctagagggaatccaacagttgaagctgatgtcattttagaagatggaacttacggaagagctgccgtaccatcaggtgcatcaacaggaattaacgaggctgttgagcttagagatggtgataagtctgtatatatgggaaaaggggttttaaaggcaattgaaaatataaaaaacataattgccccagaacttgaaggtatgagtgccttaaatcaggttgcaatcgacagaaaaatgcttgaacttgatggcacccctacaaaagaaaagcttggtgctaatgcaattttagcagtttcaatggctacagctaaagctgctgcaaagtaccttggacttaggccttatcaatatcttggagcgtacaaagccaacattttgcctacacctatgtgtaatattattaatggcggtgcacactctgacaactctgttgactttcaggagttcatgataatgccaataggagcaaaaacattcagtgaagcaataagaatggcagcagaggtttttcatacgctaaagggcattctaagtggcaaagggtatgcaacttctgttggagatgaagggggatttgctccaaatttgaaatcaaatgaagaagcttgtgaagtgattatagaggcaataaagaaggcaggatatgaacctggaaaagacattgcaatagctcttgatcccgcaacatctgagctttatgatccaaaaacaaaaaaatacgtacttaaatggtcaacaaaagaaaaacttacttccgaacaaatggttgaatattgggcaaagtgggtagaaaaatatccaatcatttcaattgaagatggaatggctgaagaagattgggatggatggaaaaaacttacagacaaaattggaaacaaaatacaacttgttggagatgatttatttgtaacaaatacctcgtttcttaaaaaaggaattgaaatgggagttgccaattcaatccttattaaggtcaatcaaattggaacactaacagaaacatttgaggctgtagaaatggctaaaaaagcgggttacacagcaatagtctctcacagatcgggagaaacagaagatacaacaatagctgatcttgtagtagctcttggaacaggacaaatcaaaactggttcactctcaagaacagatagaatagcaaaatacaatcaactcataagaatagaggaagaattggaaacaactgctgaataccacggtaagagcgtcttttattctattaaacaaaaataa

SEQ ID NO: 555 - DNA, 1434 bp, Borrelia burgdorferi
atgatttcaaagttaacaaaaattgtagcaacaatatctgatcttagatgcgaaccagaacatataaaagatttacacgatgcaggggtaaatgttataagactaaatactgctcatcaatcacacgaagatacaataaaagtaatagacaatgttagaaaaatttcaaataaaatagctttaatgattgatacaaaaggaccagaagttagaacagcaaatattgaaaatcctattattgtaaaaactggagacaaggtaatcatttcaacctcgcctattaatgagcctaataactttcaaaccaattatgatggatttgttaaagaagtaccccaaggatctaaagtgctaattgatgacggtgaacttgaaatgactgttgttgccaaattgcctgacagattaatttgtgaaattaaaaatgacggccaaattaaaaataaaaaatcaatcaatacccccggaatttctcttaagctacaatcagtaaccgaaaaagacaaaggatttattgagcttgcagcaaaatataatgttgattttattgcccattcgtttgtaagacattccaaagacgttcaagatgttcaagaaattttaactgcctctggaaatcctgatgtaaaaattatatccaaaatcgaaaatcaagagggaattgacaacattgaagaaattgcaaaagcttcttacggaataatggttgcaaggggagacatgggagttgaaattcctgcagaagatgtacccattgctcaacttaaaataacacaaacctgtataaagtatggaatacccgtgattacagcaactcaaatgcttcatacaatgattgaaaatccaagacctactagagcagaagtgtctgacatcgctaacgctattttaaacggcacagacgcaattatgttatccggagaaaccgcctacgggaaatatccaattgaagctgtaaaaatgatgacaagcattgctaaaaaagttgaaaaacacagaaaaatgaccttatataaggatgaacttttttacgataaaagtatcacaagaaactatattatcaaatgtgcaattgatgccacaaaacttatggacataaaagcaattattgtagattctctaaaaggcaaaaccgcaagaataatggcaacctacagagcaagtgttccattattcattacaacaaatagcgaaagactagcaagagaattagcattatcttacggggtttattctaatcttgtagacaataatttcaaaagaactaccgaatttgtagtaacttctcttaaaatgttaaaagaacaaggtgttgttaatgacaaagatactgtaataattatttctggaaatccaaatagaaatattgaaaaaggaacagaatttatggaaataaacacagtagaagatgcaatcaaaggacgaaatatataa

SEQ ID NO: 556 - DNA, 1427 bp, Borrelia burgdorferi
atgaaaaataaatttttaatatgtgtatattttttattgactctgggtataagctctttagtaattgttgaatctatttttgcttttgatgaatctaataataagttatcaagatcaaattatgagcagatgatgattcaagcttttgaatttgtaaaagaaaattatgttgatcctgtaagtgatgaagtaatttttgaaggtgctttaaaaggaatatttcaatccctaggcgatccttattctcaatatttgacaaaaaaagatttagaagaaatttcaaaaacaacagtaggagattatgttggcattggaatttctataataaaaaaaatgcattcccaagataagcaagacaaggcaaaagattttgatcctaatagtgcttgtgtttctattgttacgccttttgaaggaggtccggcttataaggctggaattaaatctggagattgtattaccgctgttgatggcaagagtgtttattctatggaagtagatcaagttgttgatcttttaaaaggtaaagaaggcacaaaagttaaagtatctattcttaggggaaaaaatttaacattggattttgaacttacaagagagaagatagaaatacaaacatcaagtatgacgttattaattcagatattggctatataagaatagtaagctttaatccacacacctctgtagattttagaaaagctttagataatcttaagaataaaaatattaaatctttaattttagatttaaggcttaataccggaggatattttcaggcagctataaaaatggcggatgatattttatctaaaggaattattgtttccacaaaatcaagaaattctagcaagcctattgattataaggcaagctcaaaacaagttttgccttcaaatataaaaattgttgctttaatagacagatcatcagcctcagcatcagaggtttttgtaggagccttaaaagacaataagagagcatacattataggggaaaagtcttatggcaaggggcttattcagcatgtagttcctttttatactggtggatttaaaattacaagctcaaagtattatactccatctggaaagagtattcataaggttggaattgagcctgatttggaaataaaatctccagatttttctgaggaggaggcattaatatataaagaaatttttgataaaaagctgatagaaggttttttgaagggtaaaaaattcattaccgaacaagagattgatttttttgttgagaatcttgtaaaagaaaatccaaaatataaaattgataaagaatttttaggcaagtatgtgttttttaattactatcaggacaataataaagaattgccaatttataatctacattatgacaaagttttaaaaacagcttgtgagtatttgtctaaattaggtaattaa

SEQ ID NO: 557 - DNA, 585 bp, Borrelia burgdorferi
atgtataaaaatggtttttttaaaaactatttgtcattgtttttaatttttttagtaattgcttgtacttcaaaagatagctcaaatgaatatgttgaggagcaagaagcggagaactcttctaagcctgatgattctaaaatagatgaacatactattgggcacgtttttcacgctatgggagtagttcattcaaaaaaggatcgaaaaagtttggggaaaaatataaaggttttttatttttctgaagaagatggacattttcaaacaataccctcaaaagagaatgcaaagttaatagtttatttttatgacaatgtttatgcaggagaggctccaattagtatctctggaaaagaagcctttatttttgttgggattacccctgactttaaaaagattataaatagcaatttacatggcgctaaaagtgatcttattggtacttttaaagatcttaatattaaaaattcaaaattggaaattacagttgatgagaataattcagatgccaagaccttccttgaatctgttaattacattatcgacggcgttgaaaaaatttcacctatgttaacgaattaa

SEQ ID NO: 558 - DNA, 1878 bp, Borrelia burgdorferi
atgttttttaattttttgaaaaaagatcttgtatttgttttgccagaagtaaattcaaaagaagatgtaattgattttttaattgaaaaaatcaatgataagggatatatagataataaaaaagagtttcttcaaggaattcttgatagagaaaagataggtgacacttcttgggaaaatggggttgcaattcctcattttataggagatgttgttaagactagttttatttcattgctttacattaaaggttctggggttaagtggtctgaagaaaacccccctgttaatttaatatttttgatttgtatgtcaaaaaaacaacaaggtaatgaacaccttaaggcgattgcttttatagctaaactatttgaagatgatgcttttcaaaatgctttacgcgggtttgttactactgatgacatttattattatattgaaaatgttcaaagaaaggctaaagaagaggtttttggagctacaaaagcagaaaaaatagtggccgtaactgcttgtcctgttggagttgctcatacgtatattgcagctaagaaaattgaaaatgaagctaaaaagcagggttatagcattagagtagaaactcaaggatctattggtattgaaaatgccttaacagaagaggaaattaagaatgcgtccgttgtaatacttgctgttgataaggatattgatgaaaagagatttgaaggtaagagagtttataaagtttcaactgtaaaagcgataaacaatacagaaaatattattaaggaatcttttaatgctccggtatttaaaagcaaagactccggtactaatagtgatactaaagcttcggttgcaacaggcaaaggtagtttttataaatatttaatgagtggggtatctccaatgattcctgttgttgcaagtggaggaattttaattgctcttagcattgcttttgttgggattggacctgatgggcctaattttgctgagcatccattttataagcagattgcagatattggttctatagcttttgggatgatgttgcccgtgcttgctggttttattgcaatggcaattgctgataagcctggtcttacccccggtcttgttggtggagtaatgtctgggaatgtaaaagcaggtttcttgggcgcaatatttgcgggctttcttgcaggttatgttgcaaggtttttagcaagaagatctgttcctgagtggttaagacctgtaatgcctatatttgtaattccgctaataagcaccattattgtcggcttttttatgctgtattttggtgtttatattggaaaatttatgggggtgcttgagagtgggcttaaatctttacagagtaattcggaaacttttggcgtgttgggtaaaattttcttaggcttagtactaggttcaatgattactgttgatatgggcggaccttttaataaagtggcatttctttttggtgtagggctaattcctcaagtgccagaaataatgggaatggtagcagcagcaattcctgttcctcctatggctatggggcttgcaacctttttagcacctaaattgtttgaaaatgaagaaaaagaatctggtaaaatagcctttttaatttcatttattggtattagcgaaggagctattccttttgctgctagtgatcccggacgggtaatcccttcgatagtggtagggggagctgtatcaagcattattgccgcttttttaggcgttgctaatcatgctccacacggaggaccaatagtacttcctgttattgataataaatttgggtttattattgcaattgctgttggagttgcggttgcaacagctttggtaatttttttgaaatctttaaaattaaaggaatctgaatga

SEQ ID NO: 559 - DNA, 1206 bp, Borrelia burgdorferi
atgaaatttaggaggttagtcatggcaaaagaagtttttcaaagaacaaagccgcacatgaatgttggaacaataggtcatgttgatcatggtaaaacaacactaacagcggctattagtatttattgttcaaaattaaataaagatgcaaaagcattaaagtatgaagatattgataatgcacctgaagagaaagcaagaggaataacaattaatgctaggcatattgagtacgaaacagctaatagacattatgctcatgtagattgtccaggccatgccgattatataaaaaatatgattacaggagcagctcaaatggatgcagcgatacttttagttgctgctgatagtggtgctgagcctcaaacaaaagagcatttgcttcttgctcaaagaatgggaataaagaaaataatagtttttttaaataaattggacttagcagatcctgaacttgttgagcttgttgaagttgaagttttagaacttgttgaaaaatatggcttttcagctgatactccaataatcaaaggttcagcttttggggctatgtcaaatccagaagatcctgaatctacaaaatgcgttaaagaacttcttgaatctatggataattattttgatcttccagaaagagatattgacaagccatttttgcttgctgttgaagatgtattttctatttcaggaagaggcactgttgctactgggcgtattgaaagaggtattattaaagttggtcaagaagttgaaatagttggaattaaagaaaccagaaaaactactgttactggtgttgaaatgttccagaaaattcttgagcaaggtcaagcaggggataatgttggtcttcttttgagaggcgttgataaaaaagacattgagagggggcaagttttgtcagctccaggtacaattactccacacaagaaatttaaagcttcaatttattgtttgactaaagaagaaggcggtaggcacaagccatttttcccagggtatagaccacagttcttttttagaacaaccgatgttactggagttgttgctttagagggcaaagaaatggttatgcctggtgataatgttgatattattgttgagctgatctcttcaatagctatggataagaatgtagaatttgctgttcgagaaggtggaagaaccgttgcttcaggaagaattcttgagatattggaatag

SEQ ID NO: 560 - DNA, 1908 bp, Borrelia burgdorferi
atgggcaaaataataggtattgacctaggaacaacaaactcatgcgtagctataatggagcatggaaaaccagttgtaatacaaaattcagaagggggaagaactactccatctattgttgcttacacaaataaaggcgaaagacttgtggggcaagttgcaaaaaaccaaatggttacaaaccctgaaaacacaatttattctattaaaagatttatgggaagaagatttgaagaggttgcaagcgaaataaaaatggttccttataaaatagaaaaaggactaaatggcgatgcgcgagtaaacatttcaaatataaaaaagcaaatgtcaccgcctgagatctcagcagcaactcttacaaaaatgaaagaaacagcagaggcttatttaggtgaaaaagttacagaggctgttatcacagttcctgcttactttaatgatgctcaaagacaagccacaaaagatgctggaaaaatagcaggtcttgaggtaaaaagaattgttaacgagccaactgctgctgctcttgcttatggaattgaaaaaaaacacgaagagatcgttgctgtttacgatcttggtgggggaacatttgacatttcaatattggaacttggagatggtgtttttgaagtaaagtcaaccaacggagacacacatcttggtggtgacaattttgacgacgaaataataaaacatttaatttcagaattcaaaaaagaaagcgctattgatttatcaaacgacaaaatggctcttcaaagactcaaagaagcagctgaaaaagctaaaatagaactctcaggcgctcaagaagcttcaataaatcttccatttattacagcagatgcaaatggtccaaaacacttacaatatactctaacaagagcaaaattcgaacaaatggtagaccacttagttcaaaaaacaaaagaaccatgccttaaggctattaaagatgctgggcttaaagcttctgatattaatgaagtaatacttgtaggtggatcaacaagaattcctgctattcaaaaaattgtaaaagatatatttggacaagatcctaacaaaggagtaaatccagatgaagctgtagcaattggagctgctattcagggtggcattctaacaggagaaactaaagacatggtactccttgacgttactccactctcactaggaatagaaacactaggcggggttatgactaaacttattgaacgaaacaccacaattcctacaaaaaaaagtcaagtattctcaacagctgctgacaatcaaacctctgttgatattaaagtccttcaaggtgaacgtgaaatggcagcacaaaacagaatacttggtaattttatacttgatggaataccagcagcaccaagaggagtgcctcaaattgaagttagctttgacattgatgctaatggaatagttcatgtgtctgcaaaagatatgggaacgggcaaagaacaaaaaattagaattgaatcatcatcaggactctctgaatcagaaatagatcgaatggtaaaagatgcagaagctcatgcggaagaagataaaaaattaaaagaaaatattgaagcaaaaaatacagctaattctttaatttatcaaacagaaaaatcattaaaagaatattctgaaaaaatttcaagcgaagacaaagaagctattgaaagtaaaataaaagaattaaaagaaagtcttgaaaaagaagacatttcacttataaaatctagaacagaagaacttcaaaaagcttcttacaaaatagctgagatgatgtataaagattcttcccagcaaaatgcaaacagccaacaagaaaatggcccacaaagcaatacaagcgaagagggtaaagaggctgattatgaggttgttgacgaggataaaaaatag

SEQ ID NO: 561 - DNA, 657 bp, Borrelia burgdorferi
ttgtatatgattaggcttaaagttttaattttgtgtttatttgggatttttgtgttaaatggttttgcagatactaattttgaattcaattttggtggtggggttgcttttcctgttagtcccttttcaagcttttacaatgaggctttagagattaatgcaaagcttaagcaaaatttgccttcagatttatccccaatagaaaaagaagagatagtccaaaatttttccgatttagccaatattgctaaagctggaataagatatggaacttacgctcaatttggcgctaaatttgatgattttgtttctattggatttgagcttttgtttaacattaatcttcttaaagcaataaagcgttcggatggaactgcaaatgaaaatttctcgtttattatggcaataacaccaagattttatacaaaattagatttttttgttttagctttagcgtttttcacaggtcctaagatcaatatagcgacttcttctgcggattctgttttagcagaactgggaacaatgggctgggatattggtgctagactttcattttcttttttaattcttgaagggtactatgtttggaatattaaaaaccctaaattttctgatttcaagtttggaataggttttgaatttggaattgtgtag

SEQ ID NO: 562 - DNA, 1857 bp, Borrelia burgdorferi
atgaaaagccatattttatataaattaatcatatttttaaccacatctgcagcaatatttgcagcagacgcattaaaggaaaaagatatatttaaaataaacccatggatgccaacatttggatttgaaaacacaagtgaattcagattagatatggacgagcttgttcctgggtttgaaaacaaaagcaaaattaccattaagcttaaaccatttgaagctaatcccgaattaggcaaagacgatccattctcagcttacattaaggtagaagatcttgcactaaaagcggaaggcaaaaaaggcgatcaatttaaaattgacgtgggagatattacagcccaaatcaatatgtacgatttttttattaaaataagtactatgacagattttgactttaataaagagtctttatttagttttgcacctatgactggatttaaaagcacttactatggattcccaagcaatgatagggcagtaagagggacaattcttgcaagaggtacttctaaaaacataggaacaattcagctgggatacaaactcccaaaactcgaccttacatttgcaatagggggaacaggcacgggtaacagaaatcaagagaatgacaaagacactccatacaataaaacatatcaaggaatcctttatggaattcaagcaacatggaaaccaataaaaaatctacttgatcaaaacgaagatactaaatctgtaattgcagaaacaccttttgaattaaattttggcttgtcaggagcctatggaaacgagacattcaataattcatcaataacatactctttaaaagataaatccgtagttggcaacgatttattgagcccaactttatcaaattctgcaattttagcatcttttggagctaaatataagcttggattaacaaaaataaacgataaaaatacctatcttattttgcaaatgggaactgattttggaatagatccttttgcaagcgatttttctatatttggacacatctcaaaagcagcgaatttcaaaaaagaaacaccctcagatcctaacaaaaaagctgaaatatttgatccaaatggcaatgctcttaatttcagcaaaaacacagaattgggcattgcattttcaacaggagcaagtataggttttgcttggaataaagataccggtgaaaaagaatcctgggcgattaaaggatctgattcctacagtacaagactctttggagaacaagacaaaaaatctggagttgcattgggaataagctatggacaaaacctttacagatctaaagatacagaaaaaagattaaaaaccatatctgaaaatgcatttcaaagcttaaatgttgaaatttcaagctatgaagacaacaaaaaagggattataaatggattaggatggataacatctatcggtctttacgatattttaagacaaaaatctgtagaaaactatcctacaacaatttcaagcaccactgaaaacaatcaaactgaacaaagttcaacaagcacaaagaccacaacccctaatctgacatttgaagatgcaatgaaactcggcttggccttatatcttgattatgcaattccaatagcatccatttcaacagaagcatatgtagtaccttacattggagcatacattttaggaccttctaataaactctcaagcgatgctacaaaaatttatttaaaaacaggacttagccttgaaaaactaataagatttacaacaatttctcttggatgggattcaaataacattatagaacttgctaataaaaacacaaataatgctgctattggaagtgctttcttgcaattcaaaatagcctacagcggaagctaa

SEQ ID NO: 563 - DNA, 1638 bp, Borrelia burgdorferi
atggctaaagacatatattttaatgaggatgctagaaaaagcttacttagtggcgttgaaaaattatccaatgctgtaaaagtaactcttgggccaaaagggagaaatgtccttattgataaaaagttcggctctccaacggttacaaaggatggggttagcgttgctcgtgagattgagcttgaaaatccgtttgaaaacatgggggcacagcttttaaaggaagttgctattaaaacaaatgatgttgctggtgatggaacaacaactgctactgttcttgcttatgctattgcaagagaaggccttaagaatgtgtcttcaggaatcaatcctattggaataaaaaagggaatagatcacgctgtaaatttggctgctgagaaaattcgtcagtctgcaaaaaagattacaacaaaagaagagattgcacaagtagcttcaatttctgctaataatgacagttatataggtgaaaaaattgctgaggcaatggataaagttggaaaagatggtgttataacagttgaagagtcaaaaacctttgatactacgatttcttatgttgagggtatgcaatttgatagaggatatctttctccttatttttctaccaataaagaaaatatgagtgttaattttgacgatgctttcatattgatatatgagaaaaagattagttctattaaagagcttttaccagttcttgagaaagttttagggacaaataaacctttattaattattgctgaggatattgagggggatgctcttgctgctcttgttttaaacagcgttagaggagctttaaaggtatgtgcaattaaatctcctggttttggtgatagacgaaaagcaatgcttgaggatattgcagtgcttaccggcggtgttttaatcagtgaggagctaggccttactcttgagacagttgaaattgagcaacttggacaggctaaaactattaaggttgataaagacaataccactattattaataccggcaataaagagcaaataaaggagcgttcagagcttattaaaaagcaaattgaagattcaacatctgaatatgataaagaaaaacttcaagagcgtcttgcaaaacttgttggcggagttgctgttattaatgttggagctgttactgaggtagagcttaaggagaaaaagcatagagttgaggacgctctttctgcaactcgtgctgctgttgaagagggtgttgtgcctggcggtggatcaactcttattgaagttgctatgtatttagatacaatagatacaagtaaattaagctatgaggaaaagcaaggttttgagattgtaaaaagaagtcttgaagagccaatgagacagattatttcaaatgctggttttgaaggatctatttatattcatcaaattaaaacagaaaaaaaagggcttgggtttgatgcttccagctttaagtgggtaaatatgattgagagtggaataattgatcctgctaaggttacaagaagcgcgcttcaaaatgctgcttcaattgctggacttttattaacaacagaatgtgcaatcacagatattaaagaagagaaaaatacttctggtggtggtggttatcctatggacccaggaatgggaatgatgtaa

SEQ ID NO: 564 - DNA, 1035 bp, Borrelia burgdorferi
ttggtttacatgaaaaggaaagctaaaagtattttattttttttattatccactgttctttttgctcaagagactgatggattagcagagggttctaaaagggcagagcctggagaattagttttagattttgccgagcttgcaagagatccaagttcaactagacttgatcttacaaattatgttgattatgtatattcgggcgcttctggtattgttaagccggaagatatggttgtagatcttgggataaataattggagcgttttacttactccttctgcaaggttgcaggcttacgttaaaaattcagttgttgcgcccgctgttgttaagagtgagtcaaaaaggtacgcaggtgatactattttaggggtaagagttttgtttccaagctattctcaatcatctgctatgattatgccaccatttaaaattcctttttattcaggggaaagtggcaatcaatttttaggcaaaggtcttattgataacattaaaaccatgaaagaaattaaggtatctgtttatagtttagggtatgagatagatcttgaggttttatttgaagatatgaatggcatggaatatgcttattctatgggtactttaaagtttaaagggtgggctgatttaatttggtcaaatcctaactatattcctaatatatcatccagaattattaaagacgatgttccaaattatcctcttgcttcaagtaaaatgagatttaaggcttttagagtttcaaagtcacacagttcaaaagagcaaaatttcatcttttatgttaaagatttaagagttctttatgataagttgagtgtttcaatagattctgatattgacagtgagtctgtatttaaagtttatgagactagcggaactgaatcccttcgtaaattaaaggcacacgaaacttttaaaagagttttaaagcttagagaaaaaatttctatgcctgaaggctctttccaaaactttgtagaaaagattgagagtgaaaaacctgaagaatcatctccgaaaaattag

SEQ ID NO: 565 - DNA, 1911 bp, Borrelia burgdorferi
gtggttagtatgaagcttaaagctaggatgttgctacttgttcttattctgatagcattctttatatcaattttgttttttgcttttggaatgcttattaatagtaaattggtggatcaacagtttaatcttatgataaatcttattgaaagcattaaaagttcttttaatctttacatctcttcaatggaagagaaagttagggttagttccatgtatttcaactctgctgaaaaatttaatgaggctagtaaaattaaatccaaaaggttgagctttatttcagatcaatctgaaattcttattcaaaccggtagtaatatgatggttacagacaaagaaggtaaaatagtgtttactacggcggttaaggataatagtgattttggcaaatctattggggatagagaatattttacaaaacttaaggagtctaatagtattgtttacaattcctttgtcatgttggcagatcccgggtctattgaggagtctttacttaaagatatttccaagataaaaaataaaaaaggtcagattccttacatattaataggtatgccattaagagattttgaaacagataacatttttggttattttatgtttctttattcaatggattatatatataggtcttttagagggattaattttggaatactctctagcggtcgtgcgctagcttatgatactacgggtagattgttggttcatcatgtagtattgccaggtgatattttgactgatattagtgcttcttattccaatattattaagaaaacatctgaagatttgttgcaaaagaataaagaaatttcaactgtttattattatgatcctaaaagcaataagaaatatgtgggaattagtcaaaaggtgttattaaacttgtctaataataaatttattcttttaatgagaacttcagaggacgatttttattacatgtcacgagctacaactataatcttagcaattagttttgtatttacattacttatgcttgctattgcaactctttatcttgtgaaaaagttaagctcttctttgaataagatactggaatattctgagagacttgcttctggtaattttactgctgatattaattttggcaaatgggatactgtagagctttacagtttgtacgaagggcttgagcagttgagaaccaatttttcttcagttgcaaaaggagttattgaaaatctagattatctttatgaaaatgcaattcaaatagcaaatgcaagccagaatttaagttctggcgctgttgagcaggcttctactttagagcaaatgacagcaaatattgagcaaatttcacaaggtgtttctgagaatactgaaaatgcagctactactgaaaaaattgctgttaatactaatgaaaggactaaagaggggcataaatctgttgttaaggctattgaggcaatgactgtaattactgaaaaaattggaattattgatgagataacaaggcaaaccaatttgcttgctttaaatgcctcgattgaagctgcacgagtgggagaaaagggcaagggatttgaagtggtagctgctgaggttagaaagcttgcagatcaaagcaaagaatcagcaagagagattattgatattgcaaacagaagtttaactgttgcaagtcgtgctggggaaaattttgaacaaatagttcctggtatggaacaaacagccagacttgtaaaaaatatttctaatgaaagttataagcaaagtgttcaaatagagcaatttaaaaatgcaatagagcaggttagtcagttagtccaaactacagcctcaagcagtgaagagctttctgcaatgtctgaaaagatgttagagagtgtaaaagatttaaaagaatctgttgattattttaagatcgaaaagtaa

SEQ ID NO: 566 - DNA, 1074 bp, Borrelia burgdorferi
ttggacttgttagatttactagaaaaagaaaagcaaattaataagaacaaaggagtgtttatgacaaaaccaaaaatattctcaatcaataaagaaaaaataaaaatattgataatagtagtgttaacatctacattcttattgggaataattttttcaaatgaaaataaagtagcaaggatccttgaagaaaaattttttgattttgactttaatttaatttctaaaattgaaacagagcttgaaggaacgctaacaaaacttggcaaagattggattttaacatacaataaacaaaatattcctgttgataacaaaaaagtcaactctctaatcaaagcattagacgagcttcaaaaaaacaagcttgtaagtagagatcaaaaaaaacacaaggaactaggaattggagaaaatccaagctttaaattatttgacaataataataagctgttaacagaaatttttgttggaaaatcaggagaaggcgattcaagactggcatacattaaaggtagtgacgaaaatgtttacttaacaaaaaacattttcttatcatacaaaggaaattcttacaatacattttcagatactacattgttccaagaaaaaaacacaaaattagaaaatttatcattcaaaataataagaaaattaaacaaggaaaatgaaaataacataaataataactatgagattatcagtaaagatggcctttattttttaaataaccaaaaaatgacaaaagaaaggcctttaaatattattgctgaatttaaagctgacggacttgaaattgataaatctaaaatagatgattataatcttcaatacaaaattgaagtcaaatggagcaataaaagtgtcaataatattgaagtttattttaataaaaacgaagaaaatgacaaagacatattaatcaaaaaagataaagatgaatattactacacgactagcaaatggactttttttgatgtattcgacttagaaaaaaaattaacagaaaaagatgatatttctagcaacgataatcaagaagatcatcatgaacatcacaacaatgcagattaa

SEQ ID NO: 567 - DNA, 798 bp, Borrelia burgdorferi
atgatgagagcattatggacagcagcaagtggaatgactgcacaacaatacaatgtagatacaattgccaataacctttcaaatgtaaatactacaggatttaaaaaaataagagcagaatttgaggatctaatttatcaaacccataacagagcaggaacccctgcaactgaaaatactttaagaccacttggaaatcaagttggtcacggaacaaaaattgctgccacccagagaatatttgaacaaggaaaaatgcaatccacaaatttactcactgacgttgccattgaaggagatggattttacaaaattcttctacctgatggaacttatgcatatactagagatgggtcatttaaaatcgattctaatcgagagcttgtaacaagccaaggatacaaagtattgcctaatatactcttcccagaagaatatatccaaaactcaattacaatatctgaagagggaatagtatcggtaaaaattgataccagcaacgaaccaatagagcttgggcaaattgaaatatcaagatttatcaatcctgcaggactaagtgccattggaagcaatttatttaaagaaacagctggatcaggccaagaaatagcaggaataccaggaagtgaaggcatgggaagactaaggcaaggcatacttgaaatgtcaaatgtatctattgctgaagaaatggtaacaatgatagtagctcaaagggcttatgaaataaactcaaaagctattcaaacttctgacaatatgttaggaattgcaaataacttaaaaaggcaataa

SEQ ID NO: 568 - DNA, 1410 bp, Borrelia burgdorferi
atgaaatacttttattttttattttttttacttatttttaatgtgtatgctcaaaatgttaattctccagctcttcctagtccgcctttgttgcccgaaattacagaaaataagcctgttgagagagaaaattcttctaagggagagaatttttctaatgttggtttagatggtaagtatgttaacgatacaattctttatgggcttgatagtcaagtgacaagcattataaaagctcttaaaaaatcaagcgatagtcaatataatttttctcttaaaaaaagacttgagaaaacttttaatgctgagcttaaaagggaaatacttgaattgtttatttctcttaagtattcggggggcattgatacagcaaattatattcttgaaaattatgagagtaaaagatattcaaacgctttatttggcttggcaatttcgtatcttaaggagtttgatgataaagaaaaattaaaaaaaactcttattgacattcttgaaaataaagagggcaatgtggtatctattgcagcttattatttaggagagcttaattctcttgagtattctaaaaacatgatggaagtttttgaaaaatattctggaaatgatggggctagaagagaaatacttattgctcttggaaaaatgtccgctgttgattatcaggatagaatttatgaaatttcgctagataattacgagggcccatcaattaaggctgctgcaatcgaagcgttgtcatatcttgcttcagataaagtaactgaaaatgctgatttgtatcttcagagtaataacaataatttaaatgttaaattagctattattgcttctttgtccaaagatccttctttaaagtctaaagagattttacaaggatttttaagagattctgatgataatattaggtttaaagctattaatgcaatcaaaggacatagggactcttctgcaaaggatattttgatttataagcttaaaagcgatccatctcttaaagttagggaggcttctgctaaggccttaattgatatggatcttgggaatattgagataaaaaacattatgtttgattttaagattgacaataattttaaaatttcaatgtttagttaccttttagataaggattctctaaaagcattgtcaattgctttagaaattgttaataaagaaaatattaatagaccctcaaatgttttaaggggcgttgcttcaatgttggctggtaaaaagggtaattttgataatttttattctaaaatcattgacagcaaaaatattgatttaaggcatttagcattaaaaggagctgtttataataaatcttcatcgctttctgataagcttaaaaaaattaaaagtgaaacgaactccgaatatattaaaatgcttttaaaagattattga

SEQ ID NO: 569 - DNA, 972 bp, Borrelia burgdorferi
atgaaaaaaaaaaatttatcaatttacatgataatgctaataagtttattatcatgtaatacaagtgaccccaatgaattaactcgtaaaaaaatgcaagacaagaacgtgaaaattttaggatttttagagaaaattcaagcagataataaagaaattgttgaaaaacatatagaaaaaaaagaaaaacaaatggtgcaggctgcttctgtagcacctattaatgtagagagtaatttcccatattatcttcaagaagaaatagagataaaagaagaagagttggttccaaatactgatgaagaaaagaaggcagagaaggcaattagcgatgggagtcttgaatttgctaaattagttgatgatgaaaataaacttaaaaatgaatctgcgcaattagaatctagttttaataatgtttataaagaaatcttagaacttgcagatttaatacaagcagaggtgcatgttgcaggaaggataaatagctatataaaaaaaagaaagaccactaaagaaaaagaatataagaagagagaaattaagaataagatagaaaaacaggctctaattaagttgttcaatcagttattagaaaaaagaggcgatattgaaaatcttcatactcaattaaatagtggacttagcgagagagcatctgcaaaatacttttttgagaaagccaaagaaactttaaaagctgctattactgaaagattaaataacaaacgtaaaaatcggccatggtgggcaagaagaacacatagtaatttagcaatacaggcaaaaaatgaggcagaggatgctttaaaccaattaagtacttcttcttttaggatacttgaagcaatgaaaataaaggaagatgtaaaacagcttcttgaagaagtaaaatcttttctagattcttcaaagagcaaaatcttttctagtggcgatagattatatgattttttagagacgagtaaataa

SEQ ID NO: 570 - DNA, 510 bp, Borrelia burgdorferi
ttgaaaaaaacgattattgtatttataatattagcatttatgcttaattgcaaaaacaaaagtaatgatgccgagccaaacaacgatctagatgaaaaatcgcaagccaaatcaaacctagttgatgaagatagaattgaattcagcaaagcaacacctttagaaaaattagtaagcagattaaacttaaacaacacggaaaaagaaacactaacatttttaacaaacttattaaaagaaaaactagtagatccaaatattggcttacattttaaaaatagcggtggagacgaaagcaaaatagaagaatctgtacaaaaatttctatcagagctaaaagaagatgaaataaaagatctgcttgcgaaaattaaagaaaataaagataaaaaagaaaaagatccagaagagctaaatacttacaaaagcatacttgctagcggatttgatggaatttttaatcaagcagattccaaaaccacacttaataaacttaaagacactatatag

SEQ ID NO: 571 - DNA, 849 bp, Borrelia burgdorferi
ttgaaaagagtcattgtatcctttgtggttttaatcctagggtgtaatttagatgataattcaaaaatggagagaaagggtagtaataagcttattagagaaagtggatcagataggcggggtcaagaaaatagagccttgggggcgatgaattttgggcttttttctggagattctggtgtagtttatgatttgcaaaattatgaaactttaaaagctcttgaaaataaaaataaatttattgattactctaaaatagagtttttagaaggaacaaaatcaataaatgcttttatttgggcagtttctgttcgttggataaaaattaaagccagagatttgtttggggagtgtggagattttattaaagagcttaagggcattaagtattcttatcttgtttctcctgttgatggaagctatatttcttatgccatgcctataatagtttttgaaactactagagagagtgatccgctttattctgtttctgggtttaaattaataagcaagggaaatgatataaattttaatgaaaataaaagcggattttggggaagacttccaatgtctgaaaaatcagttgaatctgggcttgtaaccgcatatccttttggttctagcgatgctaaaaaagtgattgaagcttttgcttctctttataataatggaacttggagtgatatgattgccgagattactattaagtcaaagcaatatccaaaaaatgaaaaagtttacagaattacgcttgattctcagctttttaatgttgctatgaaaaaaataattgaaaaatatcctaaaataaaaagtgcaagttttgcatttaattcgttaattaactaa

SEQ ID NO: 572 - DNA, 489 bp, Borrelia burgdorferi
gtgtgtgggagacgtatgaaaaatattttattatttgttattttattattcttttcttgtaaagaatttaattattctgatcttaggagaaggccttcaaaggttttaaatgcttctaatggtgcatcaaataaagaacttaaaatttcttttgtagattctttaaatgatgatcaaaaagaagctttgttttttcttgaacaggtagttcttgatagcaatcccgacaagtttaatcaaatttttaatttaaatgaagagaaggtaaaagaaatgcttgttactgttgttaagtgtttaaaggccaaaagaaaggctaaaatggctcttgagagctcaaatgttgcaaatgttgccaatgctaaacagcaattgctacaggttgaaaaaacttacatagataatttgcgacaatcttttatgactactaaaaacattgaagaggcttgtaatcttgtaaaaaattatgatgcatctgcttcgttttaa

SEQ ID NO: 573 - DNA, 822 bp, Borrelia burgdorferi
atgaaaaaatatttattgggaataggtctaatattagccttaatagcatgtaagcaaaatgttagcagccttgacgagaaaaacagcgtttcagtagatttgcctggtgaaatgaaagttcttgtaagcaaagaaaaaaacaaagacggcaagtacgatctaattgcaacagtagacaagcttgagcttaaaggaacttctgataaaaacaatggatctggagtacttgaaggcgtaaaagctgacaaaagtaaagtaaaattaacaatttctgacgatctaggtcaaaccacacttgaagttttcaaagaagatggcaaaacactagtatcaaaaaaagtaacttccaaagacaagtcatcaacagaagaaaaattcaatgaaaaaggtgaagtatctgaaaaaataataacaagagcagacggaaccagacttgaatacacaggaattaaaagcgatggatctggaaaagctaaagaggttttaaaaggctatgttcttgaaggaactctaactgctgaaaaaacaacattggtggttaaagaaggaactgttactttaagcaaaaatatttcaaaatctggggaagtttcagttgaacttaatgacactgacagtagtgctgctactaaaaaaactgcagcttggaattcaggcacttcaactttaacaattactgtaaacagtaaaaaaactaaagaccttgtgtttacaaaagaaaacacaattacagtacaacaatacgactcaaatggcaccaaattagaggggtcagcagttgaaattacaaaacttgatgaaattaaaaacgctttaaaataa

SEQ ID NO: 574 - DNA, 891 bp, Borrelia burgdorferi
atgagattattaataggatttgctttagcgttagctttaataggatgtgcacaaaaaggtgctgagtcaattggttctcaaaaagaaaatgatctaaaccttgaagactctagtaaaaaatcacatcaaaacgctaaacaagaccttcctgcggtgacagaagactcagtgtctttgtttaatggtaataaaatttttgtaagcaaagaaaaaaatagctccggcaaatatgatttaagagcaacaattgatcaggttgaacttaaaggaacttccgataaaaacaatggttctggaacccttgaaggttcaaagcctgacaagagtaaagtaaaattaacagtttctgctgatttaaacacagtaaccttagaagcatttgatgccagcaaccaaaaaatttcaagtaaagttactaaaaaacaggggtcaataacakaggaaactctcaaagctaataaattagactcaaagaaattaacaagatcaaacggaactacacttgaatactcacaaataacagatgctgacaatgctacaaaagcagtagaaactctaaaaaatagcattaagcttgaaggaagtcttgtaggcggaaaaacaacagtggaaattaaagaaggtactgttactctaaaaagagaaattgaaaaagatggaaaagtaaaagtctttttgaatgacactgcaggttctaacaaaaaaacaggtaaatgggaagacagtactagcactttaacaattagtgctgacagcaaaaaaactaaagatttggtgttcttaacagatggtacaattacagtacaacaatacaacacagctggaaccagcctagaaggatcagcaagtgaaattaaaaatctttcagagcttaaaaacgctttaaaataa

SEQ ID NO: 575 - DNA, 564 bp, Borrelia burgdorferi
atgaaaattggaaagctaaattcaatagttatagccttgttttttaaactattggtcgcatgtagtattggattagtagaaagaacaaatgcagctcttgaatcgtcctctaaggatttaaaaaacaaaattttaaaaataaaaaaagaagccacgggaaaaggtgtactttttgaagcttttacaggtcttaaaaccggttccaaggtaacaagtggtggactagccttaagagaagcaaaagtacaagccattgttgaaacaggaaagttccttaagataatagaagaagaagctttaaagcttaaagaaactggaaacagtggtcaattcttggctatgtttgacttaatgcttgaggttgtagaatcgctagaagacgttggaataataggcttaaaagcccgtgttttagaggaatctaaaaataatcctataaacacagctgaaagattgcttgcggctaaagctcaaatagaaaatcaacttaaagtggttaaggaaaaacaaaatattgaaaatggtggagagaaaaaaaataataaaagcaaaaaaaagaaataa

SEQ ID NO: 576 - DNA, 1590 bp, Borrelia burgdorferi
atgataataaaaaaaagaggacttttaatactgggcattgctactgtaatctcgtgctcagcaatgtctaaaccaaaagatgatattgtctttggtgttggaattggaaacgaaccaacatcgcttgatccacaattttgcagcgataggctaggtaatttaattataaacgaactatttgtagggcttttaaggggtgaccccaaaacgggtggatacaggccaggacttgcaaaaaattgggacatttcttacgacaacacctgctatacattccatttaagagacgacatttattggagtgacggcattaaaataacagcaagcaccattagagattcctacataatggccttagaaaatgagcttgatgtgccacatattaacctattaacatcaaagataaaaaatgcacaagaattttacgaaacaaaattaaatgcagatgaagttggagtaaaggtaatcaatgagcaaactttagaaataactctctctcgcccagcaagatattttcttgacatgcttacacacccaatatttatacccattcctacgcacattgttaaaaagtttggaaacaaatggacaagctcagaaaacatggttacaagcgggcctttcaagctaaaaagaaggatcttaaacgaagaaatatctcttgaaaaaaatgaaaaattctatgatgctaaaaacgttgctattaatgagctcatatttgttactataaacgacacccgcagaatttacagtatgtacgagcacaacgaaatagatgctatttttaataacatccccttaagccttattaatgagcttatcttaagagaagatttttattcagctgacattaatcaaattgggtttttttcactaaacacaaatgttaaacctcttaacaatgtaaaagtaagagaagcattggctcttgcggttgacagagaaactctaacttacagagttcttgacaacaactttaaagcaacaagaaaaataagccctaatattaacaactataattatgggaaaaagcttaagccatacaacccgcgaaaagcagaaaagctcttagccgaagctggatatccagatggtaaaaattttccaactcttacaataaaatacaataaaaatgaccttgaaaaagaagttgctagttttattcaaagccaatggaaaaaagttttaaatattgatgtagaaattgagcctgaaacatgggtcaaccacatatcaaatattttaaaaggtcaatatgagatctcagtaaggtcctggcaaggagattatttagatcccatggcattctttaatatatttgaaactaaaaactcacattttgcatcttacggatattcaaatcctgaacttgatgagcttataataaaatccgatcttgaagaggatgaaaaactaagattagaaatattaaaaaagatagaagaaataattattgaaaatgattatccaataattccaatatacagtgttgcgggaaactatctttttaaaaacgacaaatggctagggtggaatacaaacaattcagaaagatttgccctatcagaaataaaacctatagaagaataa

SEQ ID NO: 577 - DNA, 642 bp, Borrelia burgdorferi
ttgatgcaaaggataagtattttattaatgttattggcggtgttttcttgtaagcagtttggcgatgttaaatcgcttacagaaattgattctgggaatggcatccctcttgttgttagcgatgtagttaaggatttgattcccaaagagatttctttaactcccgaagaagctgaaaagctagagtctttaaaagtctttttaaaagatgcaatgagtgttaatggtagagaagaagctttaaaagctgagtacgaaaaatcttataaagaattttttgattggctttctaaggatgttaacagacaaaaagaatttataagctcttttgacaatatttctagcattgtttctaaagcagtagatgcaagcaaaaagcgacgccccactgagcaacaatctttaggctttaaagaatatgtttgctataaaattaaaaatagcaaaggggaggctttaagtttatttttccaaaaggtagttgatgcatttggtgctgatccttacaaaaaagataatgatgagagtgttcaaaaacctgtaaaatgcaatgaagagatttttaaagtaattaaaaaagtgcttactgaaagcgagagtaacaacgaattgaaaaatttgaaaaattatggaaatgtttaa

SEQ ID NO: 578 - DNA, 609 bp, Borrelia burgdorferi
atgagcgattcaattgattttcaaaaagagatagaaaagctaaaagcatcaaaagtagaacttgagagccagcttgaaagtttaaagaaaaatcaagctcaaaaaattgttttagacaaactgcaaagcgttaatgctagcagttacccggtatttgagagccacaaatttcaagacgaagggctttattttgctcaaaaaggcggacttaaaagctcttctgctgataagtttgaaaattatcaagctttagatttttgctacaaatgcggagttaagcttattgttaacggttcaaatttgcaaatagcaaaaggcggtggtagtgatctttatggggtttgtgtagactttgacgatttttcaagaaccggcacggttgttccaatcacttgtagttttgaatgtgttttgattactaaagacaaaaccatcaaagcagaagacaaattaataataaacagcgaaggggttttagaaaaatctagcaaaaatgcatctgttattcacgctttagcattaggtcctgctttagaatttaaagacagaagagatgtttatggagttagagttctttttttagtcaagcaaataaaagattcaatttaa

SEQ ID NO: 579 - DNA, 489 bp, Borrelia burgdorferi
atgagatacaagttaaaaatattaaccagagccaaaacacatacatacgttttaaaagatattcccatgtacgattgggacagcgttttaggatttgacgttgaaagagatgagcttattagcaagcttaatgatctgcgaacattaaaagaaataaccaaactaatgatctcaagaggttttttagatgaattttacgaaattttaaacaaagagagaagatattctgagctttacaagtacgctcttcccacaattcttttttcagttcagtattcactttttgaaacaattgaaggttttaaaaagcccgggttggtttacattgaaagttttcaagataaaaacggcgactacattaagtatgactacattaatgagcgctggagttatgatttaatcacaaacagcaagccttcagacttaaactcagaagattctttagagcctggttttgagtctttgttgcaagaaggtagcaatgaataa

SEQ ID NO: 580 - DNA, 1245 bp, Borrelia burgdorferi
ttgaacggcaagcttagaaaagctttaaaaattgcaatatttacaacattgctgctagttattagctgtaatgcaaatatggatacaaacgataaaaacaaagccttaaacgaatataaattaaaaaatatttcagaagtcattaagaacagcttgcagcttgaatcagaccctaaattaaaaaaagaacctgaatcaaacataaatcaaagcacaccccctattttagaaattgaaaaaatcgaacctggaaaacaagagatgtccttaaaatctgaatttggcagcgaaagcttaatgccactagaagaaccagaagaagcaaatatggcaaaatcagaagaagaaattgcaaaaatacaagaaaaattattgttaattggagcttctgacgagatcacagatcaagaattgggcgaaaatatgcaaaaatttttaaatccaactacagtagaatttaaaatttcaacaaccaccaacgaaacaatacttaccacaattgaagaagaagaaattaataacaacaaagacaaaatttttgaccacaaagaagaaaatgtcactttaggaaataactctttagaaaatgcaactttaaacaaaaacacaataaccttagcacaaaaccaaaaatacaccactcacttaaaaaatgatgacaaattcataacaaaagaatacttaaagcaagttagagactctctagataaagcgctaaatgcaataaaaaatttagaaacatctaaagaatttagagagcttgaaaatttaccaaaggatcaagaaaactctccaagcgcaaaaaaagaatcaactgagagcaacattaataatactaataccgagaacatagaaataataaaaaacagattgctcgaagagctaaacaaaagtgagcttatttttgaagacactaaagatcccctaggaacaagcacaataaaaaaggtcatagatgctgctaaaaaatggcaggaaaaagaaaattcaagtcaaatagactgggacttgggctttaagtttcacccaaacccaaaattttacaacaaattgacagctcaagaatataaagttttggctgaaaaatttactaaagttaaaaatgaatacaaaaacacaaaagaacaactaaaagctgagtccaaattaacaaccaacagcatcagcaaaataattaacgcaacaaaagaatttgcaaaccaggtaataaacttaatcttattggtagaaaaaaattatcaataa

SEQ ID NO: 581 - DNA, 126 bp, Borrelia burgdorferi
ttgctccaattcagtaatactggttttgcattcaaaaggggggagaggggtttaaaaacctctttccccttttttatatttaattttaatattaatttaatttttctaaatcaaaataataaatag

SEQ ID NO: 582 - DNA, 924 bp, Borrelia burgdorferi
ttgaaggataacattttgaaaaataataaattaattgcaatatttttattgcatgtattaactgtgctaattttgatttcttgctctctggaagtcaaagacagcaatgaaagcaaaaagcataaaaaagagaaaaggaaaggaaaagtagaaaatctgcttgttgctattaataatttaaaaaatccaacaaagcccgcagctggaaaaaataaagcaaattcaaaggcttcaaaacaaaaaaataatcccaacgctaatgccaacaatgctccaaaaaaaatattagatcctgaagttgcaaagctaatacaaaaaatactggacagatctgagaatattattcaaataagcgaaatggattcttccaggggtgaacctaatgaccaatttggaatgagagcagaaatatttagtaaaatatttttcaatgcaaactcaacagtgcattttgacagccacgaatatacagaagagagaaggatgctttacacatctttaaatttcaacgaaggaaaaatttttaatcttgggcaaattttatcaaaactcagccaagactcaaactacagaggtttggttaaagaaactcttataaacagaggctttagcattcaattagcaatggaagaaatcagcgcaaaaatactaaatgtaaaagataaactacaacagctaaacaaacctaatttggaaacactctacaatgattttgaaaaacttacatcacttaaagaaaaatggctaaaagacacagatgaccttattgacgagtacaatactaaccctgacttacaaactgacgtttcaaaattaaatgacaccttaagatcaaaaaattcaagagctcaatttgcaaacattcacgatataattttggacttagtaaacacgactaccaatattcttgctccaattcagtaa

SEQ ID NO: 583 - DNA, 1038 bp, Borrelia burgdorferi
atgaaataccttaaaaacatttccttatttttgttaattttaggttgcaaatccatcccaaatggtaatttcaatctacacgatacaaaccataaattaggaaaactaaaatttcaagaagactcgataataagcagaaattatgataataaaatatccattgtgggagtatacaaccctttaacagaaaaagaaaattttaaagtcaatattttcatcaaaaaaaaaggattacaaatagatcctgaaaatattttgataaatgaagaaaaaattaattattcaaaatataaagcagaactcaaagtaaaatctagctttaataaaagcattatcagtatttcactaactaattcaagagatctattaacctacatttacgataaaagcacagggaaatacattaacattgactttaaggacaattggaacgtatcgcacagtataaaatttaataaggagtatattttagcatatataacagattttgataaagaaattaaaatatctaaaaatattttgcaaaaacgtattgataatagaaaaattgaaattgaaaaaacagagcttaaaacagaatataatgaaatagaggattattacatctacagtatgaaaattccaaaattatttgaaaaatcagacgctccctctgaaacttacgaaacatttgttatagcaaattattacccctgtgaaaatttaaatatactgtttttgaatttaagcttatactctgataaattacgctttctaaactctatttatgatgagaatgatagaaaattaaaaatggagcctcctgtgagagccttaaagaattcaaaaacaataaaagaaacattaaatatagtattaagtcctcaaaaaataatagagctagcaaaaaacattgaaaaagatattactctaaaattaaaatcttacggagaaaagggagaattcacatttgaaatatataaaccacttcttttaaaattcttaaaagaagtagatcattgcataaaaaatttgcaatcaagtaggcataaattttaa

SEQ ID NO: 584 - DNA, 498 bp, Borrelia burgdorferi
atgatattatatcaaaatcaattaaaatttttaaaattgttggtattttttttattaatatcttgcacttccttaaacgttgagcacgatcaatttggaaaaacatttagaatataccaaagcttaaataaaaatgcagaacttaagggtatttttaattataaaacaggaataactaaaatagtattatacacaaggtttagaaaccatagtataacagaacagaatcctttattgctgctggatggaactaaaattgagggaaaagtaagctacaaaagagataataaccatttttttggcaactggattaattattcatcatttgttttgaccaaatctttattggaaaggatgattaaagaagaagatgcttcttataagaataaggaggttaaaattagaattggattagaagatttaagcttgaaaaaatataaaattttggactttctagtaatggttgaatcgattgaaaataaagattataaaagttaa

SEQ ID NO: 585 - DNA, 1593 bp, Borrelia burgdorferi
atgaaaatattgataaaaaagttaaaagttgtattatttctcaatttaattttacttatttcttgtgttaatgaaagtaatagaaacaaattggtttttaagctaaatattggaagtgagcctgctactttagatgctcaattaataaacgatacggttggatcagggattgtaagccaaatgtttcttggcattttagatggagatcccaggactggaggatacagaccgggacttgctaaaagttgggatatttctgatgacggagtagtttatacgtttcatttaagagataatcttgtttggagtgatggagtttccattactgccgaaggaataagaaaatcttatcttagaattttagataaagaaaccggctcatcttttgttaacatgattaagtccgttattaaaaatgcagaagagtattttgacggcaaagcaaatgagtctgagcttggaattaaagctcttgatgaaaaaactttagaaataacgctaaaatctccaaagccatattttcttgatatgttagtacatcaaacatttattcctgtaccaatgcacgttattgaaaagtatgggcaaaggtggacagaccccgagaatatggttgttagtggtcctttcaaattaaaatctagagttttaaatgaaaaggttgttcttgaaaagaataataaatattataattccaaagatgttgttcttgacagtattatattttttgtcacagataatagcattacagcttataatatgtatttaaatgatgagctggatgcaatttttaagaatgttccaccagatttgcttaaggatcttaagcttagggacgattattattcaatgggtattaattcaacctctttttattctttgaacatgaaagtaaaaccgcttgacaatgttaaagttagaaaggcgctgtcttttgctattgatagaaaaaccttaacagagagcgttcttaatgatagttctattcctacaagaagagcaactccagattatattgattactcttataaaagcaatttgagcttatttgatgctgaaatggcaaagaagcttttggcagatgcaggatatcccaatggtaataattttcctttattaaaagtaaagtacaatacaagtgatagccagagaaaaattgctgaatttattcaaaatcagtggaagaaaaacttaaatattaatgtacagcttgagaatgaagaatggtcaacatatataaatagtagagtaaatggtaattatgaaataataagatcaggatggtcaggagattatgctgatcctatgacgttcttaagcatctttcaaactgaaaatacatctttttcatcttatggatattcaaattctgaatatgatgaacttttaataaaatcagataatgagagagatatttttaaaagacaggaaattctaaaaaaagcagaagcaataataattgaaagagattttccggctgtatttcttaatataacttcttctagttatctttttagaaacgacaagtggaaaggttgggagccaaatatttcggaaagatttaatttatctgaaataaaaccaattaaatga

SEQ ID NO: 586 - DNA, 528 bp, Borrelia burgdorferi
atgcaaaaaataaacatagctaaattaatttttatattaatattttcattatttgtaatatcttgtgaactatttataataaaaaggagagcaacaattacagaaacaacaacaatagaaaaaaaaagaataaattggcttattatgagtgtctcaggccttaatgatgaggccgatgaagttgcatttaaacattgtagagaaaaaataagcttattaaaagaagacttaaaatatgcaactaatgctaaagaattcgaagaaaaatttttaaatttacaaaaactttttcaagaaaaactaacatccaaactaaacgccttaaaagcagtaagagtagatatccaaagatttaatgcaaacgataatgatgatttagaaaagaacaaactcaaaatacgctcaatagctctatcagccggagtaaataccagtcctattgcactccatgctattaacataaaagaactatctgaagacgtagtagcacatatagacagtataataaaatatcttgaagaagattaa

SEQ ID NO: 587 - DNA, 864 bp, Borrelia burgdorferi
atgcaaaaagacatatatatttcgaatatatttttatatataccattattttattcgtgttttttgacgccaccaaaatctttaaaaatcaacagtatcaaaactgaagtttttgattttaagataattgaagagggggatattacaaaatataataaaaaccccattaaagagagtaacaataatatttgtcttacttttaaggaacccgaattaaatgaaataaaagaaggagaggtgtttgaaatacttgcaaatggttatgttacatgggcaaaatctggtgatttaagagatataaaagataaaaataataatttaattgaagatcttagagagcttaagtattcttatattttttcacccatccgattcaaaacttattcattgcttacctttagctatactaattatagcattaatgacaataactataaaatattcggtcaagaagtacctatagctaagataatagcatttgaatcaactgaagagtttgaaaaaaaatatgaaatcaaaagtttaaaactaaattctgaagagtcgaatattgattttgaacaaaatagaactggttttgccaaaatcaatttaaaagaaacttcaagggaacctcaatacatttattcatataattttggggtttttgacaattccttagcagattattttaagctcttttacaagaaaagtaaatgcaactatatgcctgcatatcttactataaaagataaacaaacaaataaagataaaacctacgaaatcatattaaatctaaagctatttaatgatgctattagattaatatttgataagtattcaaatttatcaaaagaaaaattaaaactttttattgatgaatga

SEQ ID NO: 588 - DNA, 522 bp, Borrelia burgdorferi
ttgagtatggaacaactaatagctcaagatttgtcaaaaagatattattacaatgaactaacatatagagatttagaaaatttagaaaagcaatttggtataaagtttgacaatcttgttactaagattgataacgtagaaaagaatttaaatctaaaaatagataatttagatactaagattgatactgttaaaagtgaacttactactaagattgatactgttaaaagcgaacttactactaagattgataacttagaaaagaatttacaaaaagatatgtttaatttggaacaaaggctagaagcaaagctggaagccaataacaaagttcttttggaaaaactggaatccaataacaaagttcttttggaaaagctggaatccaataacaaagttcttttggaaaagcttagcgtgaaaaacagagtgtcagttgttattgcatcagtagtttcgcccattgttttatctattttgtcgtccttaattatgacattaattggcaactatttcaagtag

SEQ ID NO: 589 - DNA, 894 bp, Borrelia burgdorferi
atgagaaaaagtttgtttttatatacattattaatgggaggattgatgtcttgcaatttagattccaaattatctagtaacaaagaacaaaaaaataacaataatgtaaaagaagtttcgaatagtgttcaagaagatggtcttaatgatttatatagtaatcaagaaaagcaaaaaagctttactaaaaattttggagaatggaaatatgaggatttaattaatcctatagagcctataataccttcagaatcaccaaagaataaggctaatataccaaatatttcaattgtgcatactcaaaaaaaagagataaaagaggaggatttaatcccttctactaatgaagaaaaggaagctgatgaagcaattaaatatttagaagaaaatattcttcaaaactctaaattttctgaattaattagagaagtacgtgtacttaaagatgaatatgctttaataaactctgatttttatgatgtaattgaaaagattcacaataaaaaaacatcattaatggaaaattataagaacaatagagataagataaataaattaacactgttgcaaaataatttaaagataaatattgaacttgagcagcttataaatatgattgatattgcagaaaatgaaataagatctgcggctttcttttttgacaccgctcagaaaaggttaaaagaaagtattattaaaagattagagagtaaaaataatagatcttattatgcattagaattgtctagacaggctttaagtgacgcaagaagtgctttaagcagtttagaatcttttgcttttaaaagagctgaaccaatggtaagaaagaaaaaaataaaagagcttattaaacatgcaaaaactgttttagaaagtctcaataaaaaataa

SEQ ID NO: 590 - DNA, 510 bp, Borrelia burgdorferi
atggcagatttcgattttacaaaattatgtaaaaatttcgttttaggagttgaacacaaagcatgcgtacatcaaactgaaaccgcaatagttgatgttgaatcacccatcatcaaaccgggagatccagtttattcaagtggatcaagtgaaatgggagaagtactggtaaaggctgcaactgcaacagcgggagttggtcctattcgtggatttgccttaaaaaaggcagatattgctttactagaaagtgaaaattactcaccgggcgaactaattccaataagacgtgccggggaaataaccgttatgttagataacacatttgcaactcctaaaattggtgattttgtcttcttaaagggggggaaacttgtaaaagacggcaaagggggtgtgcaagttgggagaatcaaagatgttagtcttgatgcaaatagcaaagtagttttgcttgatgttaatattggccctgagtttgagtctaatggtaacagaaaatttgcatga

SEQ ID NO: 591 - DNA, 801 bp, Borrelia burgdorferi
atgaaatcatcagtagtgacaacaagtattactgaagagcaaatatataaagagtttctgcgactaggtatggaacaactaatagctcaagatttatcaaaaagatattatcacaatgaacttacatatagagatttagaaaatttagaaaagcaatttggcataaagtttgacaatcttgttactaagattgatactgttaaaagtgaacttactactaagattgataatgtagaaaagaatttacaaaaggatatatccaacttagacgttaagattgatactgttaaaagtgaacttactactaagattgataacgtagaaaagaatttacaaaaggatatatccaacttagacgttaagattgatactgttaaaagtgaacttactactaagattgataacgtagaaaagaatttagatactaagattgataacgtagaaaagaatttagatactaagattgataacgtagaaaagaatttagatactaagattgataacgtagaaaagaatttgcaaaaagatatgtttagtttggaacaaaggctagaaataaagctggaagccaataacaaacttcttttggaaaagctggaagccaataacaaacttcttttggaaaagctggaagccaatagcaaagttcttttggaaaagctagaagccaataacaaagtttcttcagaaaagcttaaagtcagcaacagaatagttattattgcagtagtagttgtgcccactgctatatctattctaactcccttcattacgtcattaattagcaattatttcaaatag

SEQ ID NO: 592 - DNA, 711 bp, Borrelia burgdorferi
atgaaaaaaagttttttatcaatatacatgttaatttcaataagtttattatcatgtgatgttagtagattaaatcagagaaatattaatgagcttaaaatttttgttgaaaaggccaagtattattctataaaattagacgctatttataacgaatgtacaggagcatataatgatattatgacttattcggaaggtacattttctgatcaaagtaaggttaatcaagctatatctatatttaaaaaagacaataaaattgttaataagtttaaggagcttgaaaagattatagaagaatacaaacctatgtttttaagtaaattaattgatgattttgctatagaattagaccaagctgtagataatgatgtgtctaatgccagacatgttgctgattcttataaaaaacttagaaaatctgttgtattagcctacattgagagttttgatgttatatcttctaagtttgttgatagtaagtttgttgaagcttctaaaaaatttgtcaataaagctaaagagtttgtagaggaaaatgatcttatagctcttgagtgtattgtgaaaactattggagatatggttaatgatagggaaataaattcaagaagcaggtataataatttttataaaaaagaagcagattttttaggtgctgctgtagaacttgagggggcttataaagctattaagcaaactttattatag

SEQ ID NO: 593 - DNA, 669 bp, Borrelia burgdorferi
atgaaagcagttttggcaacgacaaatattaccgaagatcaaatatatagagagtttctgcgactaggaatggaacagttaatagctcaagatttgtcaaaaagatattatcacaatgagcttacatatagagatttggaaaatttagaaaaacaattcggtataaggttcgagaaccttatttctgagatttcttttttagaaaagaatttacaaaaagacatatttaatttagatgctaagatagattctgtagaaaagaatttacaaaaagacatatttaatttagatgctaagatagattctgtagaaaagaatttacaaaaagacatatttaatttagatgctaagatagattctgtagaaaagaatttacaaaaagacatatttaatttagatgctaagatagattctgtagaaaagaatttacaaaaagacatatttaatttagatgctaagatagattctgtagaaaagaatttacaaaaagacatatttaatttggcacaagctcttaaaaaagaagttcaaattaatagtcaatttttattggaaaaactcaaggtgagcaacagaataataattattattacagtaataatagttcccattgctatatctagcataacaaatattgttatgctactaattgctaaattttttaaatag

SEQ ID NO: 594 - DNA, 555 bp, Borrelia burgdorferi
atgaggattttggttggcgtttgtataatagcattggctttattgggttgttatttgcctgataatcaggaacaagctgttcaaactttttttgagaattcggaaagtagtgatatgggttccgatgagattgttactgaaggcatattttctagtttaaaattatatgcgtctgaacatcgtttattggttgagataaaaaagactttaattagtttaaaagatcctaattatcgtggtgtagtactcccagtgagtgactataatgaggagtattttaataaattctttctagatttagggtctgagcaatctaaagacctgattaagttgtttattatggtaaaaaatgagcagaacaataataaatttatgcgtatagttcgttggctgtattcatgtatagaggagttatattctccagatattaagtattctggcgaagaggggagccctgagtattatcgtaatatgcctagacccactgcttatcaacaatatttaaaagtgaagaggtatgattataatagaccagttcctattttacctacataa

SEQ ID NO: 595 - DNA, 753 bp, Borrelia burgdorferi
atgagtaaactaatattggcaatatctatactgctaataatttcatgtaaatggcatgtagacaatcccattgatgaagcaactgcagaaagtaaatcagcactaacatctgttgatcaagtattagatgagataagtgaagctacaggtctaagttcggaaaaaatcacaaaattaactccggaagagctagaaaatttagcaaaggaagctcaagatgattctgaaaaatccaaaaaagaaattgaagatcaaaaaaataccaaggaaagtaaaaacatagaagtaaaggatactcctcgcttaatcaaattgattaagaattcatcagaaaaaattgattcggtttttcaaacactaattaatataggttataatgctacctatgcagccaaaagtaatttgaagaatggactaaagatggtgaaattactggatgagttgctaaaaatatcggtaagtagcaatggtgataaaagtacccaaaaatacaatgaacttaaaaccgttgtaaataggtttaatgctgaaaattcagcgataaaggtaccattagaaaatggtagtaaaattgaagccaaaaagtgcataaaaactcttatgaccaatgtggaaacctatttcaagggcgtgagcaccgaactcaaagataaaaaagacgacaaatatactaaaatattggcagctttgagtgaggcagccaataaaatagagaatgcagcaatggccatacatttgtgctttaataattaa

SEQ ID NO: 596 - DNA, 699 bp, Borrelia burgdorferi
atgagtaaactaatattggcaatatctatactgctaataatttcatgtaaatggtatgtagacaataccattgatgaagcaactgtagaaagtaaatcagcactaacatctattgatcaagtattagatgagataagtgaagccacaggcctaagttcggaaaaaatcacaaaattaactccggaagagctagaaaatttagcaaaggaagctcaagatgactctgaaaaatccaaaaaagaaattgaagatcaaaaaaataccaaggaaagtaaaaacatagaagtaaaggatactcctcgcttaatcaaattgataaagaattcatcagaaaaaattgattcggtttttcaaacactaattaatataggttataatgctacctatgcagccaaaagtaatttgaagaatggactaaagatggtgaaattactggatgagttgctaaaaatatcggtaagtagcaatggtgataaaagtacccaaaaatacaatgaacttaaaaccgttgtaaataagtttaatgctgaaaattcggtaagcgtttcttttaaagaacattcaaacagtaaaattgaaactaaaaaatgtattcaaactcttatgaaaaatgtagaaacatactttgaaggtgtatgcagcgaacttaaaaacaaaaatgatggtgagtacgaaaaaacattgacaactttaagctaa

SEQ ID NO: 597 - DNA, 717 bp, Borrelia burgdorferi
ttgcttttaggaggtcaatctatgtttagaggaaaagaaatatatttcttgttattttcgttacttttgtttatatcatcaattataatttctcacggaataaaaaacattggcaccaaaaatgaaaattatattacggtaaagggtcttagcgaaagagaaattttatcaacgtcttctagttgggggcttagatacagcttaaccggtaacactataaatgatattaataaagcaaataatttaagcttatcgaagattaaaagtttttttttaaaacatggatttagcgaagaccatataaaaatgggatttatggaatttaatgaagagacttacaaagaatctctttataagtatagagcatatatatctttaactgttcatacaaaaaatattgagaaaatggaagcagcagaaaaaaatattgctgagctttataatcaaggtatattaattagtaatagtggggggccaagatattactttgacaatattaatgatataaagcccgaaatgttagcagattcaattagaaatgcgaaattagcggctttggaatttgcaaaacattcaagttcaaaattggggaaaattaaaaacgcaaatcaaggatattttgaatttcttccaattgatagaagcttgggcgatcaagaacgttatccaaaaaaaatattaagaatcgttacaaccgtttcttattatttggattga

SEQ ID NO: 598 - DNA, 636 bp, Borrelia burgdorferi
ttgaaaaaatatattatcaatttaagtttatgtttattattgctttcatgcaatcttttttcaaaagattctcgatcacgccaaaaatacaattttaaagtacccgctaaatcggtttcaaatcctatcaataaagaaaatatagacactgaaaaaggtactaacactacactttgcataaaagaaaaagatagcagaattataattaaagattgtattaataatcaagagctttttaaagtaaaatctaaaagaagatatgattttaaaaaagccatgcttcttggaattcaaacagctttaaaagttataaatattggcaataataataaaaaattaacttccataaaaaaacataatgatcatattttattagaatttaaagataataagatatatataattcgattatctgaacttaaaaaacatttactaaaaagcaagaaaaaaccactattaggaagtccgataccgggcggcggagatgcagaatttgtagatgatcctgatggcagaatagaagcagaattagaggcagaacaagagcaagagatgttagatagagaagattttggagacgaagaagacgaagaattagaagaagaaatatttggaaaagaaaaacctaacaattga

SEQ ID NO: 599 - DNA, 1065 bp, Borrelia burgdorferi
atgaaaaaagttaaaagtaaatatttggctttgggattactttttggttttataagttgtgatttattcataagatatgaaatgaaagaggaatcccctggcttatttgataagggaaactctattttagagactagcgaggaatctattaaaaagcctatgaataagaaaggtaaaggtaagattgctagaaagaaaggcaaaagcaaggtttctagaaaagaaccgtatattcatagtttaaaaagggactctgctaataaaagcaattttttacaaaaaaatgtaattttagaggaagaaagtttaaaaactgaattattaaaagagcaatctgagactagaaaagaaaaaatacaaaaacaacaagatgaatataaagggatgactcaaggaagtttaaattcccttagcggtgaaagtggtgaattggaggagcctattgaaagtaatgaaattgatcttactatagattctgatttaaggccaaagagttccttacaaggcattgcaggatcaaactctatttcatacactgatgaaatagaggaagaggattatgatcagtattatttagatgaatatgatgaagaggatgaagaggaaataagattaagcaatcgatatcaatcttatctagaaggtgttaaatataatgtagattcagcaattcaaacaattactaagatatataatacttatacattattttcaacaaagctaacccaaatgtattctacacgccttgacaactttgctaaagccaaagctaaagaagaagctgcaaagtttacaaaagaagaccttgaaaaaaatttcaagaccttattaaattatattcaagtaagtgtaaagactgcagcaaattttgtatacataaatgacacgcatgcaaaaaggaaattagagaacattgaagcagaaataaaaactttaattgcaaagatcaaagaacaatctaatttatacgaagcatataaagcaatagtaacgtcaatcttattaatgagggattctcttaaagaagtgcaaggtatcattgacaagaatggcgtttggtactaa

SEQ ID NO: 600 - DNA, 555 bp, Borrelia burgdorferi
atgagtaattttgcatgtgaagctaaacccaaatatgagtatgtaaagcaggtatttcttgataaggattttccagaagatgtagttgattatgtgctacttcgtagttcaaattatgtatatgaaaacctagaaagtagcatgagtatgctagaaaaggaaatgaataaagctagagatgagtttagaagtggaatagggaagttagatgaaagaataggcaagttagatgaaaaggtagaaaaagtaagaagtgagctttctgcagagataaagacagtaagaagtgagcttaagggtgagatagtaaagttagatgaaagaatagaaaaagtaagaagtgagcttaagggtgagatagtaaagttagatgaaagaataggcaagttagatgaaaaaataaatacaaatcataaagagcttatagggttgtttaaggaaataagaagtgagaacaactcgcatataaaaagcttgatatatccattttattggatattaggaatatttattccatcagtagtgggaatgtttttatatttactgcaaaaatag

SEQ ID NO: 601 - DNA, 849 bp, Borrelia burgdorferi
atgaaaaagaacatatatattttgaatatatttttatatataccattattttattcgtgttttttgactccaccaaaatcttcaaaaatcaacagtatcaaaaccgaggttttggattttaagataattgaagagggaaatattataaaatatgataaaaagcccattgaagagcgtaatgaaaatacttgtctttcttttaaagaacccgaattaaatgaaataaaagagggggacgtgcttgaattacttgcaggtggttatgttacatgggcaaaatctggtgacttaagggttttaaaagataaaaataacaatttaattgaagatcttagagaacttaggtactcttatattttttcacccattcgattcaaaactttttttagttataattatagcattaatgacaataactataaaatactcggcaaaaaagcacctatagttaagataatagcatttgaatcaactaaagagtttgaaaaaaaatacgaaataaatagtttaaaactaaattctgaagaatctaatattgattttgaacaaaatagaactggtttagccaaaattaatttaaaagaaacttcaaaagaacctaattacatttattcatataattttggagtttttgacaattctttagcagattattttaagttattttataaaaaaaataactgtaactatatgcctgcatatcttactataaaagataaagaaaccgataaatataaaacctacgaaattatattaaatctaaagctatttaacgataccattaaattattaattaataagtattcaaatttatcaaaagaaaaattaaaactttttactgatgaatga

SEQ ID NO: 602 - DNA, 555 bp, Borrelia burgdorferi
atgaggattttggttggcgtttgtataatagcagcattggctttattgggttgttatttgcctgataatcaggaacaagctgttcaaactttttttgagaattcggaaagtagtgatatgggttccgatgagattgttactgaaggcatattttctagtttaaaattatatgcgtctgaacatcgtttattggttgagataaaaaagactttaattagtttaaaagatcctaattatcgtgatgtagtacgcccagtgagtgactataatgaggagtattttaataaattctttctagatttagggtctgagcaatctaaagacctgattaagttgtttattatggtaaaaaatgagcagaacaataataaatttatgcgtatagttcgttggctgtattcatgtatagaggagttatattctctagatattaagtattctggcgaggggagccatgagtataatcgtaatatgcctagacccactgcttatgaacaatatttaaaagtgaagaggtatgattataatagcccagtttctattttacctacataa

SEQ ID NO: 603 - DNA, 558 bp, Borrelia burgdorferi
atgagtgatataacaaaaattaaacaagaatttgataagaaagttgcagaaattcaagcattaatgaaaaatccccaacaagactcaggattgcttagcaattctattgattttagagaccaaaatctaattttttccaattctggtggggtttgcactagcagtaaagacaaaatagagaattaccctgctaaagggtatccgtataaacggggtgttaagcttagttttggagatggaacaaccgaactagaagttgaggctggtggtggagacgatttatatggagtgtgttccgatatagatgagtttagcggtatggcaactgttataccaattacaaataactttactgggtatttaacgctaaagaaagatggacaaaatggtgtaaatccaggagataaattaaattttaaccaacatggggaacttgaaaaggtcactggggctcaaaaatctgttaatgcaatagcactttcaaaggcacacaaattaactgaagatttatttatagtgcttgctagtgtatttgggaatagagcaataaaagggtaa

SEQ ID NO: 604 - DNA, 585 bp, Borrelia burgdorferi
gtgtataatatgactataagggaaaattttatggaaacagtgtcaacaaatattgcaagtgtaactcaagaacaaatatataaagaatttattagactgggcatggaacaactaatagcacaagatttatctaaaagatattatcacaatgagctaacatatagagatttagaaaatttagaaaaacaatttgatataaaatttgataatcttgtttctaaaatagatggtgtcaaaaatgaacttaacactaaaattgataatgtagaaaaaaatttacaaaaagatatatctaatttagatatcaagatagataatgtagaaaagaatttgcaaaaagacatatctaatttagatactaagattgatagtgttaaaaccgaacttaatactaagattgatactgtagaaaagaatttaaatgccaaaatagatagtgttgaaaagaatttaaatgccaaaatagacaatgttgaaaagaatttaatgtctctttcagaaatgcttaaatgggtattgggaattatgggagcaatgtctataacaatgatagcagggctaatatttgcttttatttccaaatag

SEQ ID NO: 605 - DNA, 1137 bp, Borrelia burgdorferi
atgaataaaaaaacaattattatttgtgcagtttttgcgctgatactttcttgtaagaattatgcaattaaagatttagaacaaaatgcaaaagggaaaattaaaggatttatagataaggctttggatccagcaaaagataaaattacttcaagtagttcaaaagtagatgaattagcaagaaaattacaagaagaagataaaataaagggtgtagaagaaaacaataaagatgaattaatgcagggtgatgatcctaatagtggtgtaataaattcgtcaccagtattgccagaaaatagtcaagataatacaccaatattaaaagcagcggaacaaagtgatggtcaacaagaagagaaagtgaaaaaagtagaagaatccgaagctaaagttgagggaaaagaagaaaaacaagagaatacagaagaacgaaacaaacaagaattagctaaacaagaagaagaacaacaaaaacgaaaagcagaacaagaaaaacaaaaaagagaagaagagcaagaaagacaaaaaagagaagaagagcaagaaagaaaagctaaggcagaaaaagaagctaaagaaaaagcagaaagacaaaaacaagaagaacaacaaaaacgaaaagcagaaaaagaaagagaagaacaacgaaaagaggcagaaaaaaggcaagttgataacgaaattagaacacttacaggcaaaatagatgaaatcaatagaaatattgatgttataaaagagcaaactagtgtgggggcacaaggtgttatagatagaattacagggcctgtatatgatgattttactgatgggaataaagctatatacaaaacttggggggatttggaagatgataacgacgaaggattaggaaagctattaaaagaattgagtgatactagacataatttaagaaccaaattaaatgagggtaataaagcatatattattgatactagaagcactgaaccccaattaaaagaaaatgtaagtgttagcgaaattaaatcagacttagatgaactaaaatcaaaattagaagaagttaaagaatatcttgaagataaagataattttgaagaaattaaagaatacgttgctggtagtgaggataattatgatgaagaagattaa

SEQ ID NO: 606 - DNA, 483 bp, Borrelia burgdorferi
atgagaaataaaaacatatttaaattattttttgcatcaatgttatttgtaatggcttgtaaagcatatgtagaagaaaagaaagaaatagattcattaatggaggatgttttagctcttgtaaatgattcttctggaggcaaatttaaagattataaagacaaaataaatgaattaaaagaaaatttaaaagatataggcaatgcagagcttaaagaaaaactattaaatttgcaaaattcctttcaggataaattagcggccaaattagcagcgttaaaagcagctaaaaataccattgaaaacattactgacaaggatcaggatatttcaaaaagaaaaatatggtcagaagcaaaattagttggagtaactgtaccacttcttggaagcaatacttctggtaatggggataaaatgtctaaaaacgctgtagaacagatagacaaagtaataaagttcctcgaagagggcactaattaa

SEQ ID NO: 607 - DNA, 579 bp, Borrelia burgdorferi
atgaaaaataatacaaaattaataatcaataaaagggatattgattctgaggggaatgcattacttgtagattcttctaatgttagtaaaaatggtgttgaaacagatcgttataatactttgaaaaagaaattgtatgtaaaccttagagaaggagtttctaatagagtagaatgtatgaaaatcttaaaagaaattaaagataatgaatactataaacttgatggatacaaaagtttcgatgcttttataaaggattatgatgttgcaaaaactcaagcgtataactatttaaaaattgccaatgcaatagaagcaggagttattgaggaacaatatgtattagataatggatttagattaatattaagtgtattgaaagataaagaaagtccagtattgaaaaaatctaaacaaaactcaataaaaccattgagatttcaacttaaaactcaagaaagttatgatttttacaaaagcaatgctaaatttacaagttttatgatgcaagagatttttgaaaatcaaaaagatttgattagtaaacttttaaaaatgtataaacaattaaaaggataa

SEQ ID NO: 608 - DNA, 669 bp, Borrelia burgdorferi
atgaacaatttagcatacaaaacatataacatagaaagtataaaaaacgaatttttaaatatagggtttagcaaggaagcaatagattttgtttttctgcataatgataattacaactttgaatttttaaaagagaaaataattgatatagagaagaatttgcaaaaagacatatctaatttagatgccaaaatagacaatgtggaaaagaatttaaatttaaaaatagatggtttgaatatcaaaatagacaatgtagaaaagagcttaaatgccaaaatagatagtttagatactaagatagataatgtagagaagaatttaaatattaaaatagatagtgttaaaaatgaacttaattctaaaatagatagtttagacgccaaaatagacaatgtagaaaagagcttaaatgccaaaatagatagtttagatactaagatagataatgtagaaaaaactttgcaaaaagatatatctagcttgaatactaaaatagatagtgtagaaaaaaccttacaaaaggatatatttaacctagataataaaataaatgttttaaaaaacgaacttactgcaagtaatagaacaatacaagtaattttaataatgggaataacacttgctccaattatttattctatattcaataagtattttttaaattaa

SEQ ID NO: 609 - DNA, 771 bp, Borrelia burgdorferi
atggagcaacttatgaataagaaaatgtttattatttgtgctatttttgcgctgatagtttcttgcaagaattacgcaagtggtgaagatgtaaaaaaaagtttagaacaagatttaaaaggaaaagttaagggatttttagatacaaaaaaagaagagttttttggagattttaaaaaaccagaagcaaaagttcaaccaaaggatgaagaatctatgcaagctgatgagcctcaggagcagggcgaagatcaagtggttcaaggtgttgctgaagatcaaaaattaaaagaagaaattgaacaaaaaataaaagaattaaaggataagatagagaagtcggatcctaaaagtgtttctcttaaaacatattctgattatgaaaaggaaatagaagaattaaaggaaaaactaaaagataaagaaaagtttgaaaaagaattagaaatccttgagaaagctttaaatgaaaaaatagagaaaagaaaaaaagaattagaagagtctcaaaaaaaatttgaagaacttaagggtcaagttgaatctgcaattggaataactgatggagaaagggctaaaaatcaagggaaagttggaatagaagccttgcggcatgctcggggtttgggctttaaaaatatttctagtggtaatagtactagcgatatagctaaagaaataatagtaagctcgcttaaaaagattgaagaagagcttgaagagcttaaaaagttagagaaagaatctaaagattctaataaaaaagaatag

SEQ ID NO: 610 - DNA, 1089 bp, Borrelia burgdorferi
ttgccgcaagatacaattagtgtaagttttattgactctaggattcagactagtaggcccaattattataatccacttttggtttacaaaacagctaaaatcaaagttaacaaagatgctgctagctataaaatattgaatttaaccgttaataattatgaaaaacaaattgaaactttagaaaaagagaatggaaatgaagaagatcagtttggaaaagaaaaaacactgcttaaaactgcaatgtcaaattttttcaattcaagcgaagaatcgttaaaatcagccgatcttttcatttataaggataagcctgaagagctaaaaaattatcttaaagtacatagacacacttttgttgtacttattaacactgagggggatgcgtcagatgatggacttaaaatttacaaagatgactataataaattcaaaatgccttcaactttttttgtattctcgactaaagaacaagaaataaaagaactatttaaagataaaggcaatactgaaaaagaaagaaatattgctgtttacagtaacaataaagacaatttacaccttaaatttataagtcaatatctccatcaagctagtatttttcatgctgtaaatccttatagcatgccgctggctgctacaccacttgttgatgatactgtaattggaaagttgcgaactgcaaaaatcaacttttattcacttcttaatgaaactgggcttgatggtttacctgcctttaaagaaggtgttgacctagctggaagtacaatagacgaacaatttacataccactatataaaaaacgaagcgattattgagcttattaaaatttggaacaaaaacaataggcaaaatagcaaattatctgcactgcagcttagtggagctagagacaatgcatatacttcagcaattgaatgtttactgaaaaggtttgtggatagaggactgattattgagtacaaaaatttaaatcttactctttctcctaccccgcaacttaaattagaacttggcgtgaatattacttataactttagcattaatgctgttgctttagtaattactactcaagatatagtttga

SEQ ID NO: 611 - DNA, 585 bp, Borrelia burgdorferi
gtgtataatatgaccataagggaaaattttatggaaacagtgtcaacaaatattgcaagtgtaactcaagaacaaatatataaagaatttattagactgggcatggaacaattaatagcacaagatttatctaaaagatattatcacaatgagctaacatatagagatttagaaaatttagaaaaacaatttgatataaaatttgataatcttatttctaaaatagatagtgtcaaaagcgaacttaatactaaaatagacaatgtagaaaagaatttaaatctaaaaatagatggtttagatactaagatagatactgtagaaaagaatttaaatctaaaaatagatggtttagatactaagatagatactgtagaaaagaatttaaatgtcaaaatagatagtgttaaaagcgaacttaatgctaagatcgatagtgttaaaaatgaacttactgctaaaatagacaatgtagaaaagaatttaatgtctctttcagaaatgcttaaatgggtattgggaattatgggagcaatgtctatcacaatgatagcagggctaatatttgctttcatttctaaatag

SEQ ID NO: 612 - DNA, 429 bp, Borrelia burgdorferi
atgaaaattatcaacatattattttgtttatttttactaatgctaaacagctgtaattctaatgatactaatactagccaaacaaaaagtagacaaaaacgtgatttaacccaaaaagaagcaacacaagaaaaaccaaaatctaaagaagacctgcttagagaaaagctatctgaagaccaaaaaacacatcttgactggttaaaaaccgctttaactggtgctggagaatttgataaatttttaggatatgacgaagacaaaataaaaggtgcacttaatcatataaagagtgaacttgataagtgtactggggataattctgaacaacaaaaaagcaccttcaaagaggtggttaagggggctcttggtggcggtatagatagttttgcaactagtgcaagtagtacctgccaagctcagcaataa

SEQ ID NO: 613 - DNA, 540 bp, Borrelia burgdorferi
atgagaaatttggtgcacagaacatatgatatagaaagcataaaaaatgaatttttaaacataggatttagtgaagaggcaatagattttgtttttcttcataatgataattacaactatgaggttttaaaagagaaaataattgatgtagaaaagaatttgcaaaaagacatatctagtttagatactaagatagataatgtagaaaagaatttaaatgttaagatagataatgtagagaagaatttaaatattaaaatagatagtgttaaaaatgaacttaattctaaaatagatagtttagatactaagatagataatgtagaaaaaactttgcaaaaagatatatctagcttgaatactaaaatagatagtgtagaaaaaaccttacaaaaggatatatttagcctagataataaaataaatgttttaaaaaacgaacttactgcaagtaatagaacaatacaagtaattttaataatgggaataacgcttgctccaattatttattctatattcaataagcattttttaaattaa

SEQ ID NO: 614 - DNA, 561 bp, Borrelia burgdorferi
atgaataagaaaatgaaaatgtttattgtttgtgctgtttttatacttataggtgcttgcaaaattcatacttcatatgatgagcaaagtagtggtgagataaaccatactttatatgatgagcaaagtaatggtgagttaaaacttaaaaaaatagaattctctaaatttactgtaaaaattaaaaataaagataataatagtaactggacagacctaggagatttagttgtaagaaaagaagaaaatggtattgatacgggtttaaacgctgggggacattcggctacattcttttcattaaaagaatcagaagttaataactttataaaagcaatgactaaaggcggatcatttaaaactagtttgtattatggatataagtacgaacaaagtagtgcaaatggtatccaaaacaaagagatcataacaaaaatagaaagtattaatggtgctgaacatattgcgtttttaggagataaaattaataacggtgtggggggagataaaacagctgaatatgcaataccactagaagtgcttaaaaaaaatttaaaatag

SEQ ID NO: 615 - DNA, 1032 bp, Borrelia burgdorferi
atgaataaaaaaacattgattatttgtgctgtttttgcgctgataatttcttgcaagaattttgcaactggtaaagatataaaacaaaattcagaagggaaaattaaaggatttgtaaataagattttagatccagtaaaggataaaattgcttcaagtggtacaaaagtagatgaagtagcaaaaaaattacaagaagaagaaaaagaagaattaatgcagggcgatgatcctaatggcagtggaataaatccgccaccagtattgccggaaaatattcacaataatgcattagtattaaaagcaatagaacaaagtgatggtcaacaagaaaaaaaagtagaagaagctgaagctaaagttgaagaaaataaagaaaaacaagagaatacagaagaaaacattaaagaaaaagaaataatagacgaacaaaacaaacaagaattagctaaagctaaagaagaagaacaacaaaaagaacaaaaaagacatcaagaagagcaacaaagaaaagctaaagcagaaaaagaaaaaagagaaagagaagaggcagaacaacaaaaacgacaacaagaagaggaagaaaaaaggcaagttgataaccaaattaaaacacttatagctaaaatagatgagatcaatgaaaatattgatgttataaaatggcaaacgactgtaggcccacaaggcgttatagatagaattactgggcctgtgtatgatgattttaccaatggcaataattctatacgcgaaacttgggaggggttagaagaggaatcagaagacgaaggattaggaaaattattgaaagaattgagtgatgctagggacgcgctaagaactaaattaaatgaaggcaataaaccatatactggttacgaagagcctaagttaaaagaaagtgtaaatgttagcgaaattaaagaagatttagaaaaattaaaatcaaaattagaagaagttaaaaaatatcttaaagatagttctaaatttgaagaaattaaaggatacatcagtgacagtcagtaa

SEQ ID NO: 616 - DNA, 573 bp, Borrelia burgdorferi
atgactaatttagcgtacagaacatataacatagaaagcataaaaaatgaatttttaaacatagggtttagtgaggaggcaatagattttgtttttcttcataatgataatttcaattttgaatttttaaaagagaaaataatcgatttagaaaagaatttgagaaaagatatatctaatttagatataaaaatagatactgtagaaaaaagtttaaatctaaaaatagatactatagaaaaaagtttaaatctaaaaatagattttgtagaaaagagtttaaatgccaaaatagatagtttagataccaagataaataatgtagaaaaaactttacaaaaagatatatccagtttagatactaaaatagatagtgtaaaaaacgaacttaattctaaaatagatagtatagaaaaaaccttgcaaaaggatatatctagtctagataataaaatagatgttttaaaaaatgaacttaatgcaagcaatagaacaatacaagtaattctaataatgggaataacacttgctccaattatctattctatatttaataagtatttctttaattga

SEQ ID NO: 617 - DNA, 690 bp, Borrelia burgdorferi
atgaataagaaaatgaaaatgtttattatttgtgctgtttttgcattgatgatttcttgcaagaattatgcaagtggtgaaaatctaaaaaattcagaacaaaatctagaaagttcagaacaaaatgtaaaaaaaacagaacaagagataaaaaaacaagttgaaggatttttagaaattctagagacaaaagatttatctaaattagatgaaaaagatacaaaagaaattgaaaaacaaattcaagaattaaagaataaaatagaaaaattagattctaaaaaaacttctattgaaacatattctgagtatgaagaaaaaataaacaaaataaaagaaaaattgaaaggaaaaggacttgaagataaatttaaggagcttgaagagagtttagcaaagaaaaagggggagagaaaaaaagctttacaagaggccaaacagaaatttgaagaatataaaaaacaagtagatacttcaactgggaaaactcaaggcgacaggtctaaaaaccgaggtggtgttggagtgcaagcttggcagtgtgccaatgaattaggtttgggtgtaagttattctaatggcggcagtgacaacagcaatactgatgaattagcaaacaaagttatagatgattctcttaaaaagattgaagaagaacttaagggaatagaagaagataaaaaagaataa

SEQ ID NO: 618 - DNA, 633 bp, Borrelia burgdorferi
atgactaatttagcgtacaaaacgtataacatagaaagcataaaaaatgagtttttaaacataggatttagtgaagaggcaatagattttgttttgcttcataatgaaaattacagctttgaggttttaaaagaaaaattgattaatgtagagaagaatttgcaaaaagatatatctagtttggacattaagatagatactgtagaaaagaatttacaaaaggatatatctaatttagacattaagattgatgccgtggaaaagaatttacaaaaggatatatctaatttagacatcaagattgataatgtagaaaagaatttgaaaaaagatatatctagtttagatactaagattgatgttgtagagaagaatttaaatctaaaaatagattttgtagaaaagagtttaaatgccaaaatagatagtttagacgttaaaatagataatgtaaataataaagtagattatattaaaagtgaacttattgccaagatagatagtgtagaaaaagggttaaacgaaaaacttaatacaggaaataggctaatacattttatgatattaacagcagcgattctaggcccagttttaaatgccctatttatgagatatttacaatatatcaaataa

SEQ ID NO: 619 - DNA, 1137 bp, Borrelia burgdorferi; identical to SEQ ID NO: 605

SEQ ID NO: 620 - DNA, 552 bp, Borrelia burgdorferi
atgaggattttggttggcgttttcataatagcagcattggctttattgggttgttatttgcctgataatcaggaacaagctgttcaaactttttttgagaattcggaaagtattgatatgggttccgatgagattgttactgaaggcatattttctagtttaaaattatatgcgtctgaacatcgtttattggttgagataaaaaagactttaattagtttaaaagatcctaattatcgtgatgtacccccagtgcgtgactataatgaggagtattttaataaattctttttagatttaggttctgagcaatctaaagacttgattaagttgtttggtagggtaaaaaatgagcagaataataaatttaaaagtgaagtttattggctgtattcatgtataagcgagttatattctccagatattaagtattctggcgaagaggggagccctgagtatgatcgttttatgcctagacccactgcttatcaacaatatttaaaagtgaagagagaaatagaaagaaatacaattaatggaaaaattttatga

SEQ ID NO: 621 - DNA, 865 bp, Borrelia burgdorferi
atgaaaaagaacatatgtattttgaatatatttttatatataccattattttattcatgctttttgactacaccaaaatcttcaaaaatcaacagtatcaaaaccgaggttttggattttaagataattgaagagggaaatattataaaatatgataaaaagcccattgaagagagtaatagcaatatttgtcttacctttaaggaacccgaattaaacgaaataaaagaaggagaggcatttgaaatacttgcaagtggttatgttacatgggcaaaatctggtgatttaaaagatataaaagataaaaataacaatttaattgaaaatcttagagagcttaagtattcttatattttttcacccatccgattcaaaacttattcattgcttacctttagctatacttaattatagcattaatgacaataactataaaatattcggtcaagaagtacctatagctaagataatagcatttgaatcaactgaagagtttgaaaacaaatatgaaatcaaaagtttaaaactaaattctgaagagtcgaatattgattttgaacaaaatagaactggttttgccaaaatcaatttaaaagaaacttcaagggaacctcaatacatttattcatataattttggggtttttgacaattccttagtagattattttaagctcttttacaagaaaagtaaatgcaactatatgcctgcatatcttactataaaagataaacaaacaaataaagataaaacctacgaaatcatattaaatctaaagctatttaataatactattagattaatatttaataagtattcaaatttatcaaaagaaaaattaaaactttttactgatgaatga

SEQ ID NO: 622 - DNA, 717 bp, Borrelia burgdorferi
atgaccataagggaaaattttatggaaacagtgtcaacaaatattgcaagtgtaactcaagaacaaatatataaagaatttattagactgggtatggaacaactaatagcacaagatttatctaaaagatattatcacaatgagctaacatatagagatttagaaaatttagaaaaacaatttgatataaaatttgataatcttatttttaagattgatagcgtagaaaagaatttacaaaaagatatatccaatttagacgttaagattgatactgtagagaagaatttaaatgccaaaatagatggtgtagagaagaatttaaatgccaaaatagatggtgtagagaagaatttaaatgccaaaatagatagtgtggaaaagaatttaaatctaaaaatagatagtttagatactaagatagatactgtagaaaagaatttacaaaaggatatatctaatttagatactaagattgatactgtagagaagaatttaaatgttaagattgatactgttaaaagcgaacttaatactaaaatagacaatgtagaaaagaatttacaaaaagacatatctaatttagatgctaaaatagataatgtagaaaagaatttaatgtctcttacagaaatgcttaaatgggtattaggaatcatgggagcaatgtctatcacaatgatagccgggctaatatttgctttcatttctaaatag

SEQ ID NO: 623 - DNA, 756 bp, Borrelia burgdorferi
atggataataaaaaacctaaaataatcacaatagcgtcaattaagggcggtgttgggaaaagtacaagtgctattataatggcaacattgcttgcaaaagagcataaagttcttttaattgatatggatacacaagcatccactacaagttatttttataaagaaattttaaatcaaaatattgatattgtgaaaattaatgtatatagagtgttaaaagaaaaaatagatattaatgattcaattgtaaagattaaagaaaatttagacttaatccccagttatttaactttaaataaatttttaagcgaatccataccattaaaagagttaaggttgcaaaataatttagaatttttaaagcggaggtatcattatgtaataatagatactaatcctagtttagattacactctgtcaaatgctttaatgactagtaattgcataatagttccaatgactgcggaaaaatgggcggttgaaagtttagaattattggaatttcatatgaacaatttaaaaataaaaattccaatatttttggttataacacgatttaagaaaaacaatactcataagcaattgttacaacacgttgaatctaagacaggatttttgggatttatccatgaacgagaagatttaaataaaaaaattgctaaaaatgaagagtttgatatgaccaaagattatattaatgaatataaaggggtattatcaagatttttaattgtatatgatgaatatgttaaataa

SEQ ID NO: 624 - DNA, 537 bp, Borrelia burgdorferi
atgaatagtttgacttacagaacatacaatatagaaagtataaaaaatgagtttttaaagataggatttagtgaagaggcaatagattttgtttttctgcataatgataattacaactttgaatttttaaaagaaaaattgattaatgtagaaaagaatttacaaaaggatatatctaatttagacattaagattgatactgtagaaaagaatttaaacactaaaatagacaatgtagaaaagaatttaaacactaaaatagacaatgtagaaaagaatttaaatctaaaaatagataatttagactctaaaatagatactgtagaaaagaatttaaacactaaaatagacaatgttgaaaagaatttaaacctaaaaatggatggcttgaatatcaaaatagacaatgtagaaaagagtttaaatcaaaaacttagcatgggtaacagactagtacattttatgataataacagcagcaattctagggccaattttgaatgccctatttatgaaatatttacaaggtggcaaataa

SEQ ID NO: 625 - DNA, 387 bp, Borrelia burgdorferi
atgagtaatttagcctacaatgctcttaaaatagaaaatataaggttagaatttttaaataaggggtttagtgaagaggcaatagattttgttttacttcagaacgacaattacaactttgaagttttaaaggagaaaatgaattctttagaacaacaaataattaatgtagaaaagaattttcaaaaagatatagatagtgtaaatactaaaatagatagtgtagaaaaaactttgcaaaaagatatatctagtctagacaataaaatagatatttaaaaaaatgaacttaatgcaagcaatagaacaatacaagtaattctaataatgggaataacgtttgccccaattatctattctatatttaataagtgttttttcaattga

SEQ ID NO: 626 - DNA, 675 bp, Borrelia burgdorferi
atgaataaaaaaataaaaatgtttattatttgtgctatttttatgctgataagttcttgtaagaatgatgtaactagtaaagatttagaaggggcggtgaaagatttagaaagttcagaacaaaatgtaaaaaaaacagaacaagagataaaaaaacaagttgaaggatttttagaaattttagagacaaaagatttaaacacattagatacaaaagaaattgaaaaacaaattcaagaattaaagaataagatagaaaaattagactctaaaaaaacttctattgaaacatattctgggtatgaagaaaaaataaacaaaataaaagaaaaattaaacggaaaaggacttgaagataaattaaatgaactttcagagagcttaaaaaagaaaaaagaggagagaaaaaaagctttacaagaggctaaaaagaaatttgaagagtataaaaaccaagctgaatctgcaactggagtaacgcatggttctcaagtccaaagacaaggtggtgttggattacaagcttggcagtgtgctaatagtttggggtttaaaaatatgactagtggtaataatactagcgatatgaccaatgaagttataactaattcgcttaaaaagattgaagaagaacttaaaaatattggagaaactgtagaaggtaaaaaagaataa

SEQ ID NO: 627 - DNA, 591 bp, Borrelia burgdorferi
atgaataagaaaatgaaaaatttaattatttgtgcagtttttgttttgataatttcttgcaagattgatgcgagtagtgaagatttaaaacaaaatgtaaaagaaaaagttgaaggatttttagataaagagttaatgcaaggtgacgatcctaataacagtctgtttaatccaccaccagtattgccggcaagttcccacgataacacacccgtattaaaagcggtgcaagcaaaagatggtggtcaacaagaaggaaaagaagagaaagaaaaagaaattcaagaattaaaggataaaatagataaaagaaaaaaagaattagaagaggctagaaagaaatttcaagaatttaaagaacaagttgaatctgcaactggagaaagtactgagaaagttaaaaaacaaggaaatattggacaaaaagctttaaagtatgctaaagaattgggtgtaaatggaagttattctgttaatgatggtactaatactaatgattttgtaaaaaaggttatagatgatgctcttaaaaatattgaggaagaacttgaaaagctagcagagcctcaaaatatagaagataaaaaataa

SEQ ID NO: 628 - DNA, 528 bp, Borrelia burgdorferi
aattctgctgatgagtctgttaaagggcctaatcttacagaaataagtaaaaaaattacggattctaatgcggttttacttgctgtgaaagaggttgaagcgttgctgtcatctatagatgaaattgctgctaaagctattggtaaaaaaatacaccaaaataatggtttggataccgaaaataatcacaatggatcattgttagcgggagcttatgcaatatcaaccctaataaaacaaaaattagatggattgaaaaatgaaggattaaaggaaaaaattgatgcggctaagaaatgttctgaaacatttactaataaattaaaagaaaaacacacagatcttggtaaagaaggtgttactgatgctgatgcaaaagaagccattttaaaaacaaatggtactaaaactaaaggtgctgaagaacttggaaaattatttgaatcagtagaggtcttgtcaaaagcagctaaagagatgcttgctaattcagttaaagagcttacaagccctgttgtggcagaaagt

SEQ ID NO: 629 - DNA, 525 bp, Borrelia burgdorferi
aattctgctgatgagtctgttaaagggcctaatcttacagaaataagtaaaaaaattacagaatctaacgcagttgttctggctgtaaaagaaattgaaactttgctttcatctatagatgaacttgctactaaagctattggtcaaaaaatagatgcaaatggtttaggcgttcaggcgaatcaaaacggatcattgttagcaggtgcctatgcaatatcaaccctaataacacaaaaattaagtgcattaaattcagaagacttaaaagaaaaagttgcaaaggttaagaaatgttccgaagacttcactaacaagttaaaaaatggtaatgcacagcttggcttagctgctgctactgatgataatgcaaaagcggcgattttaaaaacaaatgggactaacgataagggcgctaaagaacttaaagatctatctgattcagtagaaagcttggtaaaagcagctcaagtaatgctaactaattcagttaaagagcttacaagtcctgttgtggcagaaagt

SEQ ID NO: 630 - DNA, 531 bp, Borrelia burgdorferi
aattctgctgatgagtctgttaaagggcctaatcttacagaaataagtaaaaaaattacagaatctaacgcagttgttctggctgtgaaagaaattgaaactttgcttgcatctatagatgaacttgctactaaagctattggtaaaaaaatacaacaaaatggtggtttagctgtcgaagcggggcataatggaacattgttagcaggtgcttatacaatatcaaaactaataacacaaaaattagatggattgaaaaattcagaaaaattaaaggaaaaaattgaaaatgctaagaaatgttctgaagattttactaaaaaactagaaggagaacatgcgcaacttggaattgaaaatgttactgatgagaatgcaaaaaaagctattttaataacagatgcagctaaagataagggcgctgcagagcttgaaaagctatttaaagcagtagaaaacttggcaaaagcagctaaagagatgcttgctaattcagttaaagagcttacaagtcctattgtggcagaaagt

SEQ ID NO: 631 - DNA, 531 bp, Borrelia burgdorferi
aattctgccgatgagtctgttaaagggcctaatcttacagaaataagtaaaaaaattacagaatctaatgcagttgtactggctgtaaaagaagttgcggcgttgctttcatctatagatgagcttgctaaagctattggtaaaaaaataaataataatggtttagatgatgtgcaaaacttcaacgcatcattattggcaggagctcatacaatatcaaaattagtaacagaaaaattaagcaaattgaaaaattcagaaggattaaaagaaaaaattgaggacgccaaaaaatgttctgatgattttactaaaaaactacaatctagccatgcacagcttggtgttgctggtggtgctactactgatgaagaggctaaaaaagctattttaagaacaaacgcaattaaagataagggcgcagatgaacttgaaaagttatttaaatcagtagaaagcttagcaaaagcagctcaagacgcactagccaattcagttaacgagcttacaagtcctgttgtggcagaaact

SEQ ID NO: 632 - DNA, 531 bp, Borrelia burgdorferi
aattctgctgatgagtctgttaaagggcctaatcttacagaaataagtaaaaaaattacggattctaatgcggttttacttgctgtgaaagaggttgaagtgttgctgtcatctatagatgaacttgctaagaaagctattggtaaaaaaatagatcaaaacaatgctttaggcactctaaataatcataacggatcattgttggcgggagcttatgctatatcagctctaataacagaaaaattaagttcaataaaagattcaggagaattgaaggcagaaattgaaaaggctaagaaatgttctgaaagctttactaaaaaactatcagataatcaagcagagcttggtatagagaatgctactgatgataatgcaaaaaaggctattttaaaaacacataatgctaaagacaagggtgctgaagaacttgtaaagttatctgaatcagtagcaggcttattaaaagcagctcaagccatactggctaattcagttaaagagcttacaagtcctgttgtggcagaaagt

SEQ ID NO: 633 - DNA, 534 bp, Borrelia burgdorferi
aattctgctgatgagtctgttaaagggcctaatcttacagaaataagtaaaaaaattacagaatctaacgcagttgttctcgccgtgaaagaagttgaaactctgcttgcatctatagatgaagttgctaagaaagctattgggaatttgatagcccaaaatggtttaaatgccggcgcaaatcaaaacggatcattgttagcgggagcctacgtaatatcaaccctaatagcagaaaaattagatggattgaaaaattcagaagaattaaaggaaaaaattgaagatgctaaaaaatgtaacaaagcatttactgataaactaaaaagtagtcatgcggaactcggtatagcgaatggagctgctactgatgctaatgcaaaagcggctattttaaaaacaaatggtactaaagataagggtgctcaagagcttgaaaagttatttgaatcagtaaaaaacttgtcaaaagcagctcaagaaacactaaataattcagttaaagaacttacaagtcctgttgtggcagaaaat

SEQ ID NO: 634 - DNA, 528 bp, Borrelia burgdorferi
aattctgctgatgagtctgttaaagggcctaatcttacagaaataagtaaaaaaattacagaatctaacgcagttgttctcgccgtgaaagaagttgaaactttgcttacatctatagatgagcttgctaaagctattggtaaaaaaataaaaaacgatgttagtttagataatgaggcagatcacaacggatcattaatatcaggagcatatttaatttcaacattaataacaaaaaaaataagtgcaataaaagattcaggagaattgaaggcagaaattgaaaaggctaagaaatgttctgaagaatttactgctaaattaaaaggtgaacacacagatcttggtaaagaaggcgttactgatgataatgcaaaaaaagccattttaaaaacaaataatgataaaactaagggcgctgatgaacttgaaaagttatttgaatcagtaaaaaacttgtcaaaagcagctaaagagatgcttactaattcagttaaagagcttacaagccctgttgtggcagaaagt

SEQ ID NO: 635 - DNA, 537 bp, Borrelia burgdorferi
aattctgctgatgagtctgttaaagggcctaatcttgcagaaataagtaaaaaaattacagaatctaacgcagttgttctggctgtaaaagaagttgaggctttgcttgcatctatagatgaaattggtagtaaagctattggtaaaagaatacaagcgaatggtttacaggacttgcaagggcagaacggatcattgttagcaggagcctatgcaatttcaaatttaataacacaaaaaataaatgtattaaatggactgaaaaattcagaagaattgaaagagaaaattaacgaggctaagggctgctctgaaaaatttactaaaaaactatcagaaagtcatgcagatattggtatacaagccgctactgatgctaatgcaaaagatgctattttaaaaacaaatcctactaaaactaagggtgctgaagaacttgataagttatttaaagcggtggaaaacttgtcaaaagcggctaaagagatgcttgctaattcagttaaagaacttacaagtcctgttgtggcagaaagt

SEQ ID NO: 636 - DNA, 525 bp, Borrelia burgdorferi
aattctgctgatgagtctgttaaagggcctaatcttacagaaataagtaaaaaaattacagaatctaacgcagttgttctggccgtgaaagaagttgagaccttacttgcatctatagatgaacttgctaccaaagctattggtaaaaaaataggcaataatggtttagaggccaatcagagtaaaaacacatcattgttatcaggagcttatgcaatatctgacctaatagcagaaaaattaaatgtattgaaaaatgaagaattaaaggaaaagattgatacagctaagcaatgttctacagaatttactaataaactaaaaagtgaacatgcagtgcttggtctggacaatcttactgatgataatgcacaaagagctattttaaaaaaacatgcaaataaagataagggtgctgcagaacttgaaaagttatttaaagcggtagaaaacttatcaaaagcagctcaagacacattaaaaaatgctgttaaagagcttacaagtcctattgtggcagaaagt

SEQ ID NO: 637 - DNA, 1017 bp, Borrelia burgdorferi
gctaaaagccaagttgctgataaggacgacccaacaaacaaattttaccaatctgtcatacaattaggtaacggatttcttgatgtattcacatcttttggtgggttagtagcagaggcttttggatttaaatcagatccaaaaaaatctgatgtaaaaacctattttactactgtagctgccaaattggaaaaaacaaaaaccgatcttaatagtttgcctaaggaaaaaagcgatataagtagtacgacggggaaaccagatagtacaggttctgttggaactgccgttgagggggctattaaggaagttagcgagttgttggataagctggtaaaagctgtaaagacagctgagggggcttcaagtggtactgctgcaattggagaagttgtggctgatgctgatgctgcaaaggttgctgataaggcgagtgtgaaggggattgctaaggggataaaggagattgttgaagctgctggggggagtgaaaagctgaaagctgttgctgctgctaaaggggagaataataaaggggcagggaagttgtttgggaaggctggtgctgctgctcatggggacagtgaggctgctagcaaggcggctggtgctgttagtgctgttagtggggagcagatattaagtgcgattgttacggctgctgatgcggctgagcaggatggaaagaagcctgaggaggctaaaaatccgattgctgctgctattggggataaagatgggggtgcggagtttggtcaggatgagatgaagaaggatgatcagattgctgctgctattgctttgagggggatggctaaggatggaaagtttgctgtgaaggatggtgagaaagagaaggctgagggggctattaagggagctgctgagtctgcagttcgcaaagttttaggggctattactgggctaataggagacgccgtgagttccgggctaaggaaagtcggtgattcagtgaaggctgctagtaaagaaacacctcctgccttgaataagtga

SEQ ID NO: 638 - DNA, 717 bp, human herpesvirus 1
atgtcgcagggcgccatgcgtgccgttgttcccattatcccattccttttggttcttgtcggtgtatcgggggttcccaccaacgtctcctccaccacccaaccccaactccagaccaccggtcgtccctcgcatgaagcccccaacatgacccagaccggcaccaccgactctcccaccgccatcagccttaccacgcccgaccacacaccccccatgccaagtattggactggaggaggaggaagaggaggagggggccggggacggcgaacatcttgaggggggagatgggacccgtgacaccctaccccagtccccgggcccagccttcccgttggctgaggacgtcgagaaggacaaacccaaccgtcccgtagtcccatcccccgatcccaacaactcccccgcgcgccccgagaccagtcgcccgaagacaccccccaccattatcgggccgctggcaactcgccccacgacccgactcacctcaaagggacgacccttggttccgacgcctcaacataccccgctgttctcgttcctcactgcctcccccgccctggacaccctcttcgtcgtcagcaccgtcatccacaccttatcgtttttgtgtattggtgcgatggcgacacacctgtgtggcggttggtccagacgcgggcgacgcacacaccctagcgtgcgttacgtgtgcctgccgtccgaacgcgggtag

SEQ ID NO: 639 - DNA, 486 bp, human herpesvirus 1
atgagccagacccaacccccggccccagttgggccgggcgacccagatgtttacttaaaaggcgtgccgtccgccggcatgcaccccagaggtgttcacgcacctcgaggacacccgcgcatgatctccggacccccgcaacggggtgataatgatcaagcggcggggcaatgtggagattcgggtctactacgagtcggtgcggacactacgatctcgaagccatctgaagccgtccgaccgccaacaatccccaggacaccgcgtgttccccgggagccccgggttccgcgaccaccccgagaacctagggaacccagagtaccgcgagctcccagagaccccagggtaccgcgtgaccccagggatccacgacaaccccggtctcccagggagccccggtctccccgggagccccggtctccccgggagccccggaccccacgcaccccccgcgaaccacgtacggctcgcgggtctgtatag

SEQ ID NO: 640 - DNA, 1653 bp, human herpesvirus 1
atggatcgcggggcggtggtggggtttcttctcggtgtttgtgttgtatcgtgcttggcgggaacgcccaaaacgtcctggagacgggtgagtgtcggcgaggacgtttcgttgcttccagctccggggcctacggggcgcggcccgacccagaaactactatgggccgtggaacccctggatgggtgcggccccttacacccgtcgtgggtctcgctgatgccccccaagcaggtgcccgagacggtcgtggatgcggcgtgcatgcgcgctccggtcccgctggcgatggcgtacgcccccccggccccatctgcgaccgggggtctacgaacggacttcgtgtggcaggagcgcgcggccgtggttaaccggagtctggttattcacggggtccgagagacggacagcggcctgtataccctgtccgtgggcgacataaaggacccggctcgccaagtggcctcggtggtcctggtggtgcaaccggccccagttccgaccccacccccgaccccagccgattacgacgaggatgacaatgacgagggcgaggacgaaagtctcgccggcactcccgccagcgggaccccccggctcccgcctccccccgcccccccgaggtcttggcccagcgcccccgaagtctcacatgtgcgtggggtgaccgtgcgtatggagactccggaagctatcctgttttcccccggggagacgttcagcacgaacgtctccatccatgccatcgcccacgacgaccagacctactccatggacgtcgtctggttgaggttcgacgtgccgacctcgtgtgccgagatgcgaatatacgaatcgtgtctgtatcacccgcagctcccagaatgtctgtccccggccgacgcgccgtgcgccgcgagtacgtggacgtctcgcctggccgtccgcagctacgcggggtgttccagaacaaaccccccaccgcgctgttcggccgaggctcacatggagcccgtcccggggctggcgtggcaggcggcctccgtcaatctggagttccgggacgcgtccccacaacactccggcctgtatctgtgtgtggtgtacgtcaacgaccatattcacgcctggggccacattaccatcagcaccgcggcgcagtaccggaacgcggtggtggaacagcccctcccacagcgcggcgcggatttggccgagcccacccacccgcacgtcggggcccctccccacgcgcccccaacccacggcgccctgcggttaggggcggtgatgggggccgccctgctgctgtctgcactggggttgtcggtgtgggcgtgtatgacctgttggcgcaggcgtgcctggcgggcggttaaaagcagggcctcgggtaaggggcccacgtacattcgcgtggccgacagcgagctgtacgcggactggagctcggacagcgagggagaacgcgaccaggtcccgtggctggcccccccggagagacccgactctccctccaccaatggatccggctttgagatcttatcaccaacggctccgtctgtatacccccgtagcgatgggcatcaatctcgccgccagctcacaacctttggatccggaaggcccgatcgccgttactcccaggcctccgattcgtccgtcttctggtaa

SEQ ID NO: 641 - DNA, 1608 bp, human herpesvirus 1
atggagcttagctacgccaccaccatgcactaccgggacgttgtgttttacgtcacaacggaccgaaaccgggcctactttgtgtgcggggggtgtgtttattccgtggggcggccgtgtgcctcgcagcccggggagattgccaagtttggtctggtcgttcgagggacaggcccagacgaccgcgtggtcgccaactatgtacgaagcgagctccgacaacgcggcctgcaggacgtgcgtcccattggggaggacgaggtgtttctggacagcgtgtgtcttctaaacccgaacgtgagctccgagctggatgtgattaacacgaacgacgtggaagtgctggacgaatgtctggccgagtactgcacctcgctgcgaaccagcccgggtgtgctaatatccgggctgcgcgtgcgggcgcaggacagaatcatcgagttgtttgaacacccaacgatagtcaacgtttcctcgcactttgtgtataccccgtccccatacgtgttcgccctggcccaggcgcacctcccccggctcccgagctcgctggaggccctggtgagcggcctgtttgacggcatccccgccccacgccagccacttgacgcccacaacccgcgcacggatgtggttatcacgggccgccgcgccccacgacccatcgccgggtcgggggcggggtcggggggcgcgggcgccaagcgggccaccgtcagcgagttcgtgcaagtcaaacacattgaccgcgtgggccccgctggcgtttcgccggcgcctccgccaaacaacaccgactcgagttccctggtgcccggggcccaggattccgccccgcccggccccacgctaagggagctgtggtgggtgttttatgccgcagaccgggcgctggaggagccccgcgccgactctggcctcacccgcgaggaggtacgtgccgtacgtgggttccgggagcaggcgtggaaactgtttggctccgcgggggccccgcgggcgtttatcggggccgcgttgggcctgagccccctccaaaagctagccgtttactactatatcatccaccgagagaggcgcctgtcccccttccccgcgctagtccggctcgtaggccggtacacacagcgccacggcctgtacgtccctcggcccgacgacccagtcttggccgatgccatcaacgggctgtttcgcgacgcgctggcggccggaaccacagccgagcagctcctcatgttcgaccttctccccccaaaggacgtgccggtgggaagcgacgtgcaggccgacagcaccgctctgctgcgctttatagaatcgcaacgtctcgccgtccccgggggggtgatctcccccgagcacgtcgcgtaccttggtgcgttcctgagcgtgctgtacgctggccgcgggcgcatgtccgcagccacgcacaccgcgcggctgacaggggtgacctccctggtgctagcggtgggtgacgtggaccgtctttccgcgtttgaccgcggagcggcgggcgcggccagccgcacgcgggccgccgggtacctggatgtgcttcttaccgttcgtctcgctcgctcccaacacggacagtctgtgtaa

SEQ ID NO: 642 - DNA, 1467 bp, human herpesvirus 1
atgacggattcccctggcggtgtggcccccgcctcccccgtggaggacgcgtcggacgcgtccctcgggcagccggaggagggggcgccctgccaggtggtcctgcagggcgccgaacttaatggaatcctacaggcgtttgccccgctgcgcacgagccttctggactcgcttctggttatgggcgaccggggcatccttatccataacacgatctttggggagcaggtgttcctgcccctggaacactcgcaattcagtcggtatcgctggcgcggacccacggcggcgttcctgtctctcgtggaccagaagcgctccctcctgagcgtgtttcgcgccaaccagtacccggacctacgtcgggtggagttggcgatcacgggccaggccccgtttcgcacgctggttcagcgcatatggacgacgacgtccgacggcgaggccgttgagctagccagcgagacgctgatgaagcgcgaactgacgagctttgtggtgctggttccccagggaacccccgacgttcagttgcgcctgacgaggccgcagctcaccaaggtccttaacgcgaccggggccgatagtgccacgcccaccacgttcgagctcggggttaacggcaaattttccgtgttcaccacgagtacctgcgtcacctttgctgcccgcgaggagggcgtgtcgtccagcaccagcacccaggtccagatcctgtccaacgcgctcaccaaggcgggccaggcggccgccaacgccaagacggtgtacggggaaaatacccatcgcaccttctctgtggtcgtcgacgattgcagcatgcgggcggtgctccggcgactgcaggtcggcgggggcaccctcaagttcttcctcacgacccccgtccccagtctgtgcgtcaccgccaccggtcccaacgcggtatcggcggtatttctcctgaaaccccagaagatttgcctggactggctgggtcatagccaggggtctccttcagccgggagctcggcctcccgggcctctgggagcgagccaacagacagccaggactccgcgtcggacgcggtcagccacggcgatccggaagacctcgatggcgctgcccgggcgggagaggcgggggccttgcatgcctgtccgatgccgtcgtcgaccacgcgggtcactcccacgaccaagcgggggcgctcggggggcgaggatgcgcgcgcggacacggccctaaagaaacctaagacggggtcgcccaccgcacccccgcccgcagatccagtccccctggacacggaggacgactccgatgcggcggacgggacggcggcccgtcccgccgctccagacgcccggagcggaagccgttacgcgtgttactttcgcgacctcccgaccggagaagcaagccccggcgccttctccgccttccgggggggcccccaaaccccgtatggttttggattcccctga

SEQ ID NO: 643 - DNA, 1185 bp, human herpesvirus 1
atggggggggctgccgccaggttgggggccgtgattttgtttgtcgtcatagtgggcctccatggggtccgcagcaaatatgccttggtggatgcctctctcaagatggccgaccccaatcgctttcgcggcaaagaccttccggtcctggaccagctgaccgaccctccgggggtccggcgcgtgtaccacatccaggcgggcctaccggacccgttccagccccccagcctcccgatcacggtttactacgccgtgttggagcgcgcctgccgcagcgtgctcctaaacgcaccgtcggaggccccccagattgtccgcggggcctccgaagacgtccggaaacaaccctacaacctgaccatcgcttggtttcggatgggaggcaactgtgctatccccatcacggtcatggagtacaccgaatgctcctacaacaagtctctgggggcctgtcccatccgaacgcagccccgctggaactactatgacagcttcagcgccgtcagcgaggataacctggggttcctgatgcacgcccccgcgtttgagaccgccggcacgtacctgcggctcgtgaagataaacgactggacggagattacacagtttatcctggagcaccgagccaagggctcctgtaagtacgccctcccgctgcgcatccccccgtcagcctgcctctccccccaggcctaccagcagggggtgacggtggacagcatcgggatgctgccccgcttcatccccgagaaccagcgcaccgtcgccgtatacagcttgaagatcgccgggtggcacgggcccaaggccccatacacgagcaccctgctgcccccggagctgtccgagacccccaacgccacgcagccagaactcgccccggaagaccccgaggattcggccctcttggaggaccccgtggggacggtggcgccgcaaatcccaccaaactggcacataccgtcgatccaggacgccgcgacgccttaccatcccccggccaccccgaacaacatgggcctgatcgccggcgcggtgggcggcagtctcctggcagccctggtcatttgcggaattgtgtactggatgcgccgccacactcaaaaagccccaaagcgcatacgcctcccccacatccgggaagacgaccagccgtcctcgcaccagcccttgttttactag

SEQ ID NO: 644 - DNA, 1908 bp, human herpesvirus 1
atggcagccgatgccccgggagaccggatggaggagcccctgcccgacagggccgtgcccatttacgtggctgggtttttggccctgtatgacagcggggactcgggcgagttggcattggatccggatacggtgcgggcggccctgcctccggataacccactcccgattaacgtggaccaccgcgctggctgcgaggtggggcgggtgctggccgtggtcgacgacccccgcgggccgttttttgtggggctgatcgcctgcgtgcagctggagcgcgtcctcgagacggccgccagcgctgcgattttcgagcgccgcgggccgccgctctcccgggaggagcgcctgttgtacctgatcaccaactacctgccctcggtctccctggccacaaaacgcctggggggcgaggcgcaccccgatcgcacgctgttcgcgcacgtcgcgctgtgcgcgatcgggcggcgcctcggcactatcgtcacctacgacaccggtctcgacgccgccatcgcgccctttcgccacctgtcgccggcgtctcgcgagggggcgcggcgactggccgccgaggccgagctcgcgctgtccgggcgcacctgggcgcccggcgtggaggcgctgacccacacgctgctttccaccgccgttaacaacatgatgctgcgggaccgctggagcctggtggccgagcggcggcggcaggccgggatcgccggacacacctacctccaggcgagcgaaaaattcaaaatgtggggggcggagcctgtttccgcgccggcgcgcgggtataagaacggggccccggagtccacggacataccgcccggctcgatcgctgccgcgccgcagggtgaccggtgcccaatcgtccgtcagcgcggggtcgccttgtccccggtactgccccccatgaaccccgttccgacatcgggcaccccggcccccgcgccgcccggcgacgggagctacctgtggatcccggcctcccattacaaccagctcgtcgccggccatgccgcgccccaaccccagccgcattccgcgtttggtttcccggctgcggcggggtccgtggcctatgggcctcacggtgcgggtctttcccagcattaccctccccacgtcgcccatcagtatcccggggtgctgttctcgggacccagcccactcgaggcgcagatagccgcgttggtgggggccatagccgcggaccgccaggcgggcggtcagccggccgcgggagaccctggggtccgggggtcgggaaagcgtcgccggtacgaggcggggccgtcggagtcctactgcgaccaggacgaaccggacgcggactacccgtactaccccggggaggctcgaggcgcgccgcgcggggtcgactcccggcgcgcggcccgccattctcccgggaccaacgagaccatcacggcgctgatgggggcggtgacgtctctgcagcaggaactggcgcacatgcgggctcggaccagcgccccctatggaatgtacacgccggtggcgcactatcgccctcaggtgggggagccggaaccaacaacgacccacccggccctttgtcccccggaggccgtgtatcgccccccaccacacagcgccccctacggtcctccccagggtccggcgtcccatgcccccactcccccgtatgccccagctgcctgcccgccaggcccgccaccgcccccatgtccttccacccagacgcgcgcccctctaccgacggagcccgcgttcccccccgccgccaccggatcccaaccggaggcatccaacgcggaggccggggcccttgtcaacgccagcagcgcagcacacgtggacgttgacacggcccgcgccgccgatttgttcgtctctcagatgatgggggcccgctga

SEQ ID NO: 645 - DNA, 1743 bp, human herpesvirus 1
atggacccgtactgcccatttgacgctctggacgtctgggaacacaggcgcttcatagtcgccgattcccgaaacttcatcacccccgagttcccccgggacttttggatgtcgcccgtctttaacctcccccgggagacggcggcggagcaggtggtcgtcctacaggcccagcgcacagcggctgccgctgccctggagaacgccgccatgcaggcggccgagctccccgtcgatatcgagcgccggttacgcccgatcgaacggaacgtgcacgagatcgcaggcgccctggaggcgctggagacggcggcggccgccgccgaagaggcggatgccgcgcgcggggatgagccggcgggtgggggcgacgggggggcgcccccgggtctggccgtcgcggagatggaggtccagatcgtgcgcaacgacccgccgctacgatacgacaccaacctccccgtggatctgctacacatggtgtacgcgggccgcggggcgaccggctcgtcgggggtggtgttcgggacctggtaccgcactatccaggaccgcaccatcacggactttcccctgaccacccgcagtgccgactttcgggacggccgtatgtccaagaccttcatgacggcgctggtactgtccctgcaggcgtgcggccggctgtatgtgggccagcgccactattccgccttcgagtgcgccgtgttgtgtctctacctgctgtaccgaaacacgcacggggccgccgacgatagcgaccgcgctccggtcacgttcggggatctgctgggccggctgccccgctacctggcgtgcctggccgcggtgatcgggaccgagggcggccggccacagtaccgctaccgcgacgacaagctccccaagacgcagttcgcggccggcgggggccgctacgaacacggagcgctggcgtcgcacatcgtgatcgccacgctgatgcaccacggggtgctcccggcggccccgggggacgtcccccgggacgcgagtacccacgttaaccccgacggcgtggcgcaccacgacgacataaaccgcgccgccgccgcgttcctcagccggggccacaacctattcctgtgggaggaccagactctgctgcgggcaaccgcgaacaccataacggccctgggcgttatccagcggctcctcgcgaacggcaacgtgtacgcggaccgcctcaacaaccgcctgcagctgggcatgctgatccccggagccgtcccttcggaggccatcgcccgtggggcctccgggtccgactcgggggccatcaagagcggagacaacaatctggaggcgctatgtgccaattacgtgcttccgctgtaccgggccgacccggcggtcgagctgacccagctgtttcccggcctggccgccctgtgtcttgacgcccaggcggggcggccggtcgggtcgacgcggcgggtggtggatatgtcatcgggggcccgccaggcggcgctggtgcgcctcaccgccctggaactcatcaaccgcacccgcacaaaccccacccctgtgggggaggttatccacgcccacgacgccctggcgatccaatacgaacaggggcttggcctgctggcgcagcaggcacgcattggcttgggctccaacaccaagcgtttctccgcgttcaacgttagcagcgactacgacatgttgtactttttatgtctggggttcattccacagtacctgtcggcggtttag

SEQ ID NO: 646 - DNA, 735 bp, human herpesvirus 1
atggcttctcttctcggggctatatgtggctggggagcgcgccccgaggaacaatatgagatgatccgcgcggccgttccgccctcggaggcggagccgcggctgcaggaggccctggcggtcgttaacgcgctacttcccgcccccatcacgctcgatgacgccctggggtccctggacgacacccgacgcctcgtgaaggcccgcgccttggcccgcacgtaccacgcctgcatggtgaacctagaacgactggcgcgccaccaccccgggttcgaggcccccacgatcgacggggccgtggcggcccatcaggacaagatgcggcgcctggcggacacgtgtatggccaccatcctgcagatgtacatgtccgtgggggcggctgacaagtccgcggatgtgctcgtctcccaggctattcggagcatggccgagagtgacgtggtcatggaggatgtggccatcgccgaacgggcccttggcctctccgccttcggggttgccgggggaacccggtcgggggggattggggtgaccgaggcgccctccttggggcacccccacacgccgcccccggaggttacgctggcgcctgccgcccgaaacggcgacgccctcccggaccccaaaccggaatcgtgtccccgcgtgtccgttcccagacctacagcctccccaaccgcacctcgccctggcccatctcgagcagctccgtgtgttttgggtcaataa

SEQ ID NO: 647 - DNA, 1473 bp, human herpesvirus 1
atggacctcttggtcgacgagctgtttgccgacatgaacgcggacggcgcttcgccaccgcccccccgcccggccgggggtcccaaaaacaccccggcggcccccccgctgtacgcaacggggcgcctgagccaggcccagctcatgccctccccacccatgcccgtcccccccgccgccctctttaaccgtctcctcgacgacttgggctttagcgcgggccccgcgctatgtaccatgctcgatacctggaacgaggatctgttttcggcgctaccgaccaacgccgacctgtaccgggagtgtaaattcctatcaacgctgcccagcgatgtggtggaatggggggacgcgtacgtccccgaacgcacccaaatcgacattcgcgcccacggcgacgtggccttccctacgcttccggccacccgcgacggcctcgggctctactacgaagcgctctctcgtttcttccacgccgagctacgggcgcgggaggagagctatcgaaccgtgttggccaacttctgctcggccctgtaccggtacctgcgcgccagcgtccggcagctgcaccgccaggcgcacatgcgcggacgcgatcgcgacctgggagaaatgctgcgcgccacgatcgcggacaggtactaccgagagaccgctcgtctggcgcgtgttttgtttttgcatttgtatctatttttgacccgcgagatcctatgggccgcgtacgccgagcagatgatgcggcccgacctgtttgactgcctctgttgcgacctggagagctggcgtcagttggcgggtctgttccagcccttcatgttcgtcaacggagcgctcaccgtccggggagtgccaatcgaggcccgccggctgcgggagctaaaccacattcgcgagcaccttaacctcccgctggtgcgcagcgcggctacggaggagccaggggcgccgttgacgacccctcccaccctgcatggcaaccaggcccgcgcctctgggtactttatggtgttgattcgggcgaagttggactcgtattccagcttcacgacctcgccctccgaggcggtcatgcgggaacacgcgtacagccgcgcgcgtacgaaaaacaattacgggtctaccatcgagggcctgctcgatctcccggacgacgacgcccccgaagaggcggggctggcggctccgcgcctgtcctttctccccgcgggacacacgcgcagactgtcgacggcccccccgaccgatgtcagcctgggggacgagctccacttagacggcgaggacgtggcgatggcgcatgccgacgcgctagacgatttcgatctggacatgttgggggacggggattccccggggccgggatttaccccccacgactccgccccctacggcgctctggatatggccgacttcgagtttgagcagatgtttaccgatgcccttggaattgacgagtacggtgggtag

SEQ ID NO: 648 - DNA, 891 bp, human herpesvirus 1
atggccgccgcgacggccgacgatgaggggtcggccgccaccatcctcaagcaggccatcgccggggaccgcagcctggtcgaggcggccgaggcgattagccagcagacgctgctccgcctggcctgcgaggtgcgccaggtcggcgaccgccagccgcggtttaccgccaccagcatcgcgcgcgtcgacgtcgcgcctgggtgccggttgcggttcgttctggacgggagtcccgaggacgcctatgtgacgtcggaggattactttaagcgctgctgcggccagtccagttatcgcggcttcgcggtggcggtcctgacggccaacgaggaccacgtgcacagcctggccgtgccccccctcgttctgctgcaccggttctccctgttcaaccccagggacctcctggactttgagcttgcctgtctgctgatgtacctggagaactgcccccgaagccacgccaccccgtcgacctttgccaaggttctggcgtggctcggggtcgcgggtcgccgcacgtccccattcgaacgcgttcgctgccttttcctccgcagttgccactgggtcctaaacacactcatgttcatggtgtacgtaaaaccgttcgacgacgagttcgtcctgccccactggtacatggcccggtacctgctggccaacaacccgccccccgttctctcggccctgttctgtgccaccccgacgagctcctcattccggctgccggggccgcccccccgctccgactgcgtggcctataaccccgccgggatcatggggagctgctgggcgtcggaggaggtgcgcgcgcctctggtctattggtggctttcggagaccccaaaacgacagacgtcgtcgctgttttatcagttttgttga

SEQ ID NO: 649 - DNA, 990 bp, human herpesvirus 1
atgaaccccgttccgacatcgggcaccccggcccccgcgccgcccggcgacgggagctacctgtggatcccggcctcccattacaaccagctcgtcgccggccatgccgcgccccaaccccagccgcattccgcgtttggtttcccggctgcggcggggtccgtggcctatgggcctcacggtgcgggtctttcccagcattaccctccccacgtcgcccatcagtatcccggggtgctgttctcgggacccagcccactcgaggcgcagatagccgcgttggtgggggccatagccgcggaccgccaggcgggcggtcagccggccgcgggagaccctggggtccgggggtcgggaaagcgtcgccggtacgaggcggggccgtcggagtcctactgcgaccaggacgaaccggacgcggactacccgtactaccccggggaggctcgaggcgcgccgcgcggggtcgactcccggcgcgcggcccgccattctcccgggaccaacgagaccatcacggcgctgatgggggcggtgacgtctctgcagcaggaactggcgcacatgcgggctcggaccagcgccccctatggaatgtacacgccggtggcgcactatcgccctcaggtgggggagccggaaccaacaacgacccacccggccctttgtcccccggaggccgtgtatcgccccccaccacacagcgccccctacggtcctccccagggtccggcgtcccatgcccccactcccccgtatgccccagctgcctgcccgccaggcccgccaccgcccccatgtccttccacccagacgcgcgcccctctaccgacggagcccgcgttcccccccgccgccaccggatcccaaccggaggcatccaacgcggaggccggggcccttgtcaacgccagcagcgcagcacacgtggacgttgacacggcccgcgccgccgatttgttcgtctctcagatgatgggggcccgctga

SEQ ID NO: 650 - DNA, 3372 bp, human herpesvirus 1
atggcagaccgcggtctcccgtccgaggcccccgtcgtcacgacctcacccgccggtccgccctcggacggacctatgcagcgcctattggcgagcctagccggccttcgccaaccgccaacccccacggccgagacggcaaacggggcggacgacccggcgtttctggccacggccaagctgcgcgccgccatggcggcgtttctgttgtcgggaacggccatcgccccggcagacgcgcgggactgctggcggccgctgctggaacacctgtgcgcgctccaccgggcccacgggcttccggagacggcgctcttggccgagaacctccccgggttgctcgtacaccgcttggtggtggctctccccgaggcccccgaccaggccttccgggagatggaggtcatcaaggacaccatcctcgcggtcaccggctccgacacgtcccatgcgctggattccgccggcctgcgcaccgcggcggccctggggccggtccgcgtccgccagtgcgccgtggagtggatagaccgctggcaaaccgtcaccaagagctgcttggccatgagcccgcggacctccatcgaggcccttggggagacgtcgctcaagatggcgccggtcccgttggggcagcccagcgcgaaccttaccaccccggcgtacagcctgctcttccccgccccgttcgtgcaagagggcctccggttcttggccctggtgagtaatcgggtgacgctgttctcggcgcacctccagcgcatagacgacgcgaccctcactcccctcacacgggccctctttacgttggccctggtggacgagtacctgacgacccccgagcggggggctgtggtcccgccgcccctgttggcgcagtttcagcacaccgtgcgggagatcgacccggccataatgattccgccgctcgaggccaacaagatggttcgcagccgcgaggaggtgcgcgtgtcgacggccctcagccgcgtcagcccgcgctcggcctgtgcgcccccggggacgctaatggcgcgcgtgcggacggacgtggccgtgtttgatcccgacgtgccgttcctgagttcgtcggcactggcagtcttccagcctgccgtctccagcctgctgcagctcggggagcagccctccgccggcgcccagcagcggctgctggctctgctgcagcagacgtggacgttgatccagaataccaattcgccctccgtggtgatcaacaccctgatcgacgctgggttcacgccctcgcactgcacgcactacctttcggccctggaggggtttctggcggcgggcgtccccgcgcggacgcccaccggccacggactcggcgaagtccagcagctctttgggtgcattgccctcgcggggtcgaacgtgtttgggttggcgcgggaatacgggtactatgccaactacgtaaaaactttcaggcgggtccagggcgccagcgagcacacgcacgggcggctctgcgaggcggtcggcctgtcggggggcgttctaagccagacgctggcgcgtatcatgggtccggccgtgccgacggaacatctggcgagcctgcggcgggcgctcgtgggggagtttgagacggccgagcgccgctttagttccggtcaacccagccttctccgcgagacggcgctcatctggatcgacgtgtatggtcagacccactgggacatcacccccaccaccccggccacgccgctgtccgcgcttctccccgtcgggcagcccagccacgccccctctgtccacctggccgcggcgacccagatccgcttccccgccctcgagggcattcaccccaacgtcctcgccgacccgggcttcgtcccctacgttctggccctggtggtcggggacgcgctgagggccacgtgtagcgcggcctaccttccccgcccggtcgagttcgccctgcgtgtgttggcctgggcccgggactttgggctgggctatctccccacggttgagggccatcgcaccaaactgggcgcgctgatcaccctcctcgaaccggccgcccggggcggcctcggccccactatgcagatggccgacaacatagagcagctgctccgggagctgtacgtgatctccaggggtgccgtcgagcagctgcggcccctggtccagctgcagccccccccgccccccgaggtgggcaccagcctcctgttgattagcatgtacgccctggccgcccggggggtgctgcaggacctcgccgagcgcgcagaccccctgattcgccaactggaggacgccatcgtgctgctgcggctgcacatgcgcacgctctccgcctttttcgagtgtcggttcgagagcgacgggcgccgcctgtatgcggtggtcggggacacgcccgaccgcctggggccctggccccccgaggccatgggggacgcggtgagtcagtactgcagcatgtatcacgacgccaagcgcgcgctggtcgcgtccctcgcgagcctgcgttccgtcatcaccgaaaccacggcgcacctgggggtgtgcgacgagctggcggcccaggtgtcgcacgaggacaacgtgctggccgtggtccggcgcgaaattcacgggtttctgtccgtcgtgtccggcattcacgcccgggcgtcgaagctgctgtcgggagaccaggtccccgggttttgcttcatgggtcagtttctagcgcgctggcggcgtctgtcggcctgctatcaagccgcgcgcgcggccgcgggacccgagcccgtggccgagtttgtccaggaactccacgacacgtggaagggcctgcagacggagcgcgccgtggtcgtggcgcccttggtcagctcggccgaccagcgcgccgcggccatccgagaggtaatggcgcatgcgcccgaggacgcccccccgcaaagccccgcggccgaccgcgtcgtgcttacgagccgtcgcgacctaggggcctggggggactacagcctcggccccctgggccagacgaccgcggttccggactccgtggatctgtctcgccaggggctggccgttacgctgagtatggattggttactgatgaacgagctcctgcgggtcaccgacggcgtgtttcgcgcttccgcgtttcgtccgttagccggaccggagtctcccagggacctggaggtccgcgacgccggaaacagtctccccgcgcctatgcccatggacgcacagaagccggaggcctatgggcacggcccacgccaggcggaccgcgagggggcgcctcattccaacacccccgtcgaggacgacgagatgatcccggaggacaccgtcgcgccacccacggacttgccgttaactagttaccaataa

SEQ ID NO: 651 - DNA, 705 bp, human herpesvirus 1
atggcttcggaggcggcgcaacccgacgcgggtttatggagcgcggggaacgcgtttgctgatcccccgcccccctacgatagcttgtctggtaggaacgaggggccgtttgtcgttattgatctggacacccccacggacccacctccaccgtactctgctgggcccctgttgtccgtgccaattccgccaacctcctccggagagggcgaggcgtcggagcggggccgctcacgccaagccgcccagcgagccgctcggcgcgcccggcgccgcgccgaacgacgtgcgcagcgccggagttttggccctggcgggttattggcaacccccctgtttcttccggaaaccaggcttgtggccccacccgacatcacaagggacctcttgtcgggcctcccgacgtacgccgaggctatgtcggaccaccccccaacctatgccactgtcgtggccgttcgttcgaccgaacagccgtccggggctttggcgcccgacgaccagcgacgaacgcaaaactcgggcgcgtggcggcctcctagggtcaattcgcgcgagctgtacagggcccaacgcgcggcgcgcggctcgtctgatcatgccccataccggcgacagggctgttgtggcgtggtgtggcgccatgctgtatttggggtggtcgcgattgtggtggtcattattctggtattcctgtggcggtaa

SEQ ID NO: 652 - DNA, 828 bp, human herpesvirus 1
atggcgggactgggcaagccctacaccggccacccaggtgacgccttcgagggtctcgttcagcgaattcggcttatcgtcccatctacgttgcggggcggggacggggaggcgggcccctactctccctccagcctcccctccaggtgcgcctttcagtttcatggccatgacgggtccgacgagtcgtttcccatcgagtatgtactgcggcttatgaacgactgggccgaggtcccgtgcaacccttacctgcgcatacagaacaccggcgtgtcggtgctgtttcaggggttttttcatcgcccacacaacgcccccgggggcgcgattacgccagagcggaccaatgtgatcctgggctccaccgagacgacggggctgtccctcggcgacctggacaccatcaaggggcggctcggcctggatgcccggccgatgatggccagcatgtggatcagctgctttgtgcgcatgccccgcgtgcagctcgcgtttcggttcatgggccccgaagatgccggacggacgagacggatcctgtgccgcgccgccgagcaggctattacccgtcgccgccgaacccggcggtcccgggaggcgtacggggccgaggccgggctgggggtggccggaacgggtttccgggccaggggggacggttttggcccgctccccttgttaacccaagggccctcccgcccgtggcaccaggccctgcggggtcttaagcacctacggattggcccccccgcgctcgttttggcggcgggactcgtcctgggggccgctatttggtgggtggttggtgctggcgcgcgcctataa

SEQ ID NO: 653 - DNA, 1173 bp, human herpesvirus 1
atgccgtgccgcccgttgcagggcctggtgctcgtgggcctctgggtctgtgccaccagcctggttgtccgtggccccacggtcagtctggtatcaaactcatttgtggacgccggggccttggggcccgacggcgtagtggaggaagacctgcttattctcggggagcttcgctttgtgggggaccaggtcccccacaccacctactacgatgggggcgtagagctgtggcactaccccatgggacacaaatgcccacgggtcgtgcatgtcgtcacggtgaccgcgtgcccacgtcgccccgccgtggcattcgccctgtgtcgcgcgaccgacagcactcacagccccgcatatcccaccctggagctcaatctggcccaacagccgcttttgcgggtccagagggcaacgcgggactatgccggggtgtacgtgttacgcgtatgggtcggtgacgcgccaaacgccagcctgtttgtcctggggatggccatagccgccgaagggactctggcgtacaacggctcggcctatggctcctgcgacccgaaactgcttccgtcttcggccccgcgtctggccccggcgagcgtataccaacccgcccctaaccaggcctccaccccctcgaccaccacctccaccccctcgaccaccatccccgctccctcgaccaccatccccgctccccaagcatcgaccacgcccttccccacgggagatccaaaaccacaacctcccggggtcaaccacgaacccccatctaatgccacgcgagcgacccgcgactcgcgatacgcgctaacggtgacccagataatccagatagccatccccgcgtccatcatagccctggtgtttctggggagctgtatttgctttatacacagatgtcaacgccgctaccgacgctcccgtcgcccgatttacagcccccagatgcccacgggcatctcatgcgcggtgaacgaagcggccatggcccgcctcggagccgagctcaaatcgcatccgagcaccccccccaaatcccggcgccggtcgtcacgcacgccaatgccctccctgacggccatcgccgaagagtcggagcccgctggggcggctgggcttccgacgccccccgtggaccccacgacacccaccccaacgcctcccctgttggtatag

SEQ ID NO: 654 - DNA, 273 bp, human herpesvirus 1
atgacgtcccggctctccgatcccaactcctcagcgcgatccgacatgtccgtgccgctttatcccacggcctcgccagtttcggtcgaagcctactactcggaaagcgaagacgaggcggccaacgacttcctcgtacgcatgggccgccaacagtcggtattaaggcgtcgacgcagacgcacccgctgcgtcggcatggtgatcgcctgtctcctcgtggccgttctgtcgggcggatttggggcgctcctgatgtggctgctccgctaa

SEQ ID NO: 655 - DNA, 1182 bp, human herpesvirus 2
atggggcgtttgacctccggcgtcgggacggcggccctgctagttgtcgcggtgggactccgcgtcgtctgcgccaaatacgccttagcagacccctcgcttaagatggccgatcccaatcgatttcgcgggaagaaccttccggttttggaccagctgaccgacccccccggggtgaagcgtgtttaccacattcagccgagcctggaggacccgttccagccccccagcatcccgatcactgtgtactacgcagtgctggaacgtgcctgccgcagcgtgctcctacatgccccatcggaggccccccagatcgtgcgcggggcttcggacgaggcccgaaagcacacgtacaacctgaccatcgcctggtatcgcatgggagacaattgcgctatccccatcacggttatggaatacaccgagtgcccctacaacaagtcgttgggggtctgccccatccgaacgcagccccgctggagctactatgacagctttagcgccgtcagcgaggataacctgggattcctgatgcacgcccccgccttcgagaccgcgggtacgtacctgcggctagtgaagataaacgactggacggagatcacacaatttatcctggagcaccgggcccgcgcctcctgcaagtacgctctccccctgcgcatccccccggcagcgtgcctcacctcgaaggcctaccaacagggcgtgacggtcgacagcatcgggatgctaccccgctttatccccgaaaaccagcgcaccgtcgccctatacagcttaaaaatcgccgggtggcacggccccaagcccccgtacaccagcaccctgctgccgccggagctgtccgacaccaccaacgccacgcaacccgaactcgttccggaagaccccgaggactcggccctcttagaggatcccgccgggacggtgtcttcgcagatccccccaaactggcacatcccgtcgatccaggacgtcgcgccgcaccacgcccccgccgcccccagcaacccgggcctgatcatcggcgcgctggccggcagtaccctggcggtgctggtcatcggcggtattgcgttttgggtacgccgccgcgctcagatggcccccaagcgcctacgtctcccccacatccgggatgacgacgcgcccccctcgcaccagccattgttttactag

SEQ ID NO: 656 - DNA, 270 bp, human herpesvirus 2
atgacctcccggcccgccgaccaagactcggtgcgttccagcgcgtcggtgccgctttaccccgcggcctcgcccgtcccggcagaagcctactactcggaaagcgaagacgaggccgccaacgacttcctcgtgcgcatgggccgccagcagtcggtcctaaggcgccgacggcggcgcacgcggtgcgtcgggctggttatcgcctgtctcgtcgtggccctcctatctggagggttcggggcacttttggtgtggctgctccgctaa

SEQ ID NO: 657 - DNA, 1914 bp, human herpesvirus 2
atggcgtcggcggaaatgcgcgagcggttggaggcgcctctgcccgaccgggcggtgcccatctacgtggccgggtttttggccctgtacgacagcggggacccgggcgagctggccctggacccagacacggtgcgtgcggccctgcctccggagaaccccctgccgatcaacgtagaccaccgcgctcggtgcgaggtgggccgggtgctcgccgtggtcaacgaccctcgggggccgttttttgtggggctgatcgcgtgcgtgcagctggagcgcgtcctcgagacggccgccagcgccgctatttttgagcgccgcggacccgcgctctcccgggaggagcgtctgctgtacctgatcaccaactacctgccatcggtctcgctgtccacaaaacgccggggggacgaggttccgcccgaccgcaccctgtttgcgcacgtggccctgtgcgccatcgggcggcgccttggaaccatcgtcacctacgacaccagcctagacgcggccatcgctccgtttcgccacctggacccggcgacgcgcgagggggtgcgacgcgaggccgccgaggccgagctcgcgctggccgggcgcacctgggcccccggcgtggaggcgctcacacacacgctgctctccaccgccgtcaacaacatgatgctgcgtgaccgctggagccttgtggccgagcggcggcggcaggccgggatcgccggacacacgtaccttcaggcgagcgaaaaatttaaaatatggggggcggagtctgcccctgcgccggagcgcgggtataaaaccggcgccccgggtgccatggacacatcccccgccgcgagcgttcccgcgccgcaggtcgccgtccgtgcgcgtcaagtcgcgtcgtcgtcttcttcttcttcttttccggcaccggccgatatgaaccccgtttcggcatcgggcgccccggcccctccgccgcccggcgacgggagttatttgtggatccccgcctctcattacaatcagctcgtcaccgggcaatccgcgccccgccacccgccgctgaccgcgtgcggcctgccggccgcggggacggtggcctacggacaccccggcgccggcccgtccccgcactacccgcctcctcccgcccacccgtacccgggtatgctgttcgcgggccccagtcccctggaggcccagatcgccgcgctggtgggggccatcgccgccgaccgccaggcgggtgggcttccggcggccgccggagaccacgggatccgggggtcggcgaagcgccgccgacacgaggtggagcagccggagtacgactgcggccgtgacgagccggaccgggacttcccgtattacccgggcgaggcccgccccgagccgcgcccggtcgactcccggcgcgccgcgcgccaggcttccgggccccacgaaaccatcacggcgctggtgggggcggtgacgtccctgcagcaggaactggcgcacatgcgcgcgcgtacccacgccccctacgggccgtatccgccggtggggccctaccaccacccccacgcagacacggagacccccgcccaaccaccccgctaccccgccaaggccgtctatctgccgccgccgcacatcgcccccccggggcctcctctatccggggcggtccccccaccctcgtatcccccagttgcggttacccccggtcccgctcccccgctacatcagccctcccccgcacacgcccacccccctccgccgccgccgggacccacgcctccccccgccgcgagcttaccccaacccgaggcgcccggcgcggaggccggcgccttagttaacgccagcagcgcggcccacgtgaacgtggacacggcccgggccgccgatctgtttgtgtcacagatgatggggtcccgctaa

SEQ ID NO: 658 - DNA, 990 bp, human herpesvirus 2
atgaaccccgtttcggcatcgggcgccccggcccctccgccgcccggcgacgggagttatttgtggatccccgcctctcattacaatcagctcgtcaccgggcaatccgcgccccgccacccgccgctgaccgcgtgcggcctgccggccgcggggacggtggcctacggacaccccggcgccggcccgtccccgcactacccgcctcctcccgcccacccgtacccgggtatgctgttcgcgggccccagtcccctggaggcccagatcgccgcgctggtgggggccatcgccgccgaccgccaggcgggtgggcttccggcggccgccggagaccacgggatccgggggtcggcgaagcgccgccgacacgaggtggagcagccggagtacgactgcggccgtgacgagccggaccgggacttcccgtattacccgggcgaggcccgccccgagccgcgcccggtcgactcccggcgcgccgcgcgccaggcttccgggccccacgaaaccatcacggcgctggtgggggcggtgacgtccctgcagcaggaactggcgcacatgcgcgcgcgtacccacgccccctacgggccgtatccgccggtggggccctaccaccacccccacgcagacacggagacccccgcccaaccaccccgctaccccgccaaggccgtctatctgccgccgccgcacatcgcccccccggggcctcctctatccggggcggtccccccaccctcgtatcccccagttgcggttacccccggtcccgctcccccgctacatcagccctcccccgcacacgcccacccccctccgccgccgccgggacccacgcctccccccgccgcgagcttaccccaacccgaggcgcccggcgcggaggccggcgccttagttaacgccagcagcgcggcccacgtgaacgtggacacggcccgggccgccgatctgtttgtgtcacagatgatggggtcccgctaa

SEQ ID NO: 659 - DNA, 2100 bp, human herpesvirus 2
atgcacgccatcgctcccaggttgcttcttctttttgttctttctggtcttccggggacacgcggcgggtcgggtgtccccggaccaattaatccccccaacagcgatgttgttttcccgggaggttcccccgtggctcaatattgttatgcctatccccggttggacgatcccgggcccttgggttccgcggacgccgggcggcaagacctgccccggcgcgtcgtccgtcacgagcccctgggccgctcgttcctcacgggggggctggttttgctggcgccgccggtacgcggatttggcgcacccaacgcaacgtatgcggcccgtgtgacgtactaccggctcacccgcgcctgccgtcagcccatcctccttcggcagtatggagggtgtcgcggcggcgagccgccgtccccaaagacgtgcgggtcgtacacgtacacgtaccagggcggcgggcctccgacccggtacgctctcgtaaatgcttccctgctggtgccgatctgggaccgcgccgcggagacattcgagtaccagatcgaactcggcggcgagctgcacgtgggtctgttgtgggtagaggtgggcggggagggccccggccccaccgcccccccacaggcggcgcgtgcggagggcggcccgtgcgtccccccggtccccgcgggccgcccgtggcgctcggtgcccccggtatggtattccgcccccaaccccgggtttcgtggcctgcgtttccgggagcgctgtctgcccccacagacgcccgccgcccccagcgacctaccacgcgtcgcttttgctccccagagcctgctggtggggattacgggccgcacgtttattcggatggcacgacccacggaagacgtcggggtcctgccgccccattgggcccccggggccctagatgacggtccgtacgcccccttcccaccccgcccgcggtttcgacgcgccctgcggacagaccccgagggggtcgaccccgacgttcgggccccccgaaccgggcggcgcctcatggccttgaccgaggacacgtcctccgattcgcctacgtccgctccggagaagacgcccctccctgtgtcggccaccgccatggcaccctcagtcgacccaagcgcggaaccgaccgcccccgcaaccactactccccccgacgagatggccacacaagccgcaacggtcgccgttacgccggaggaaacggcagtcgcctccccgcccgcgactgcatccgtggagtcgtcgccactccccgccgcggcggcggcaacgcccggggccgggcacacgaacaccagcagcgcctccgcagcgaaaacgccccccaccacaccagcccccacgacccccccgcccacgtctacccacgcgaccccccgccccacgactccggggccccaaacaacccctcccggacccgcaaccccgggtccggtgggcgcctccgccgcgcccacggccgattcccccctcaccgcctcgccccccgctaccgcgccggggccctcggccgccaacgtttcggtcgccgcgaccaccgccacgcccggaacccggggcaccgcccgtacccccccaacggacccaaagacgcacccacacggacccgcggacgctccccccggctcgccagcccccccaccccccgaacatcgcggcggacccgaggagtttgagggcgccggggacggcgaaccccccgaggacgacgacagcgccaccggcctcgccttccgaactccgaaccccaacaaaccaccccccgcgcgccccgggcccatccgccccacgctcccgccaggaattcttgggccgctcgcccccaacacgcctcgcccccccgcccaagctcccgctaaggacatgccctcgggccccacaccccaacacatccccctgttctggttcctaacggcctcccctgctctagatatcctctttatcatcagcaccaccatccacacggcggcgttcgtttgtctggtcgccttggcagcacaactttggcgcggccgggcggggcgcaggcgatacgcgcacccgagcgtgcgttacgtatgtctgccacccgagcgggattag

SEQ ID NO: 660 - DNA, 1473 bp, human herpesvirus 2
atggacctgttggtcgacgatctgtttgcggacgcggacggggtttcgccaccgccccccaggccagccgggggtcccaagaacaccccagccgcccctccgctgtacgccaccggtcggctgagtcaggcccagctgatgccctcgccgcccatgcccgtcccccccgcggccctgtttaaccgtctcctcgacgatctgggcttcagcgcgggtcccgcgctgtgtaccatgctagatacctggaacgaggacctgttctctgggttcccgaccaacgccgacatgtaccgggagtgcaagtttctgtcgacgctgcccagcgacgtgatcgactggggggatgcgcacgtccccgagcgctccccgatcgacattcgcgcccacggcgacgtggcgttccccaccctgcccgccacccgcgacgagctgccttcgtactacgaggccatggcgcagtttttccgcggtgagctgcgggcgcgggaggagagctaccggaccgtgttggcaaatttttgctcggccctgtaccggtacctgcgcgccagcgttcggcagctacaccgccaggcacacatgcggggccgcaaccgcgacctgcgggagatgctgcgcaccacgatcgcggacaggtactaccgcgagaccgcgcgcctggcgcgcgtcctgtttctgcatctatacctctttctgagccgcgagatcctatgggccgcgtacgccgagcagatgatgcggcccgatctgttcgacggcctctgctgcgacctggagagctggcgccagttggcgtgtctgtttcagcccctgatgtttatcaacggatcgctcaccgtgcggggagttcccgtggaggcccggcgactgcgggagctaaaccacattcgcgagcacctgaacctcccgctggtgcgaagtgcggcggcggaggaacccggggcgcccctcacgaccccgcccgtcctgcagggcaaccaggcccgctcctctgggtactttatgctgctgatccgggccaagttggactcgtactccagcgtcgcgacctcggagggcgagtccgtcatgcgggagcacgcgtatagccgcgggcggaccagaaacaattacggatcgacaatcgagggcctgctcgacctcccggacgacgatgacgctcctgcggaggccgggctggtggcgccgcgcatgtcgtttctctccgcgggacaacgcccccgcagactgtccaccaccgcccccattaccgacgtcagcctgggagacgaactccgcctggacggcgaggaggtggatatgacgcccgccgacgccctggacgacttcgacttggagatgctgggggacgtggagtccccctccccgggaatgacccacgaccccgtctcgtatggggctttggacgtggacgattttgagtttgaacagatgtttaccgatgccatgggcattgacgactttggggggtag

SEQ ID NO: 661 - DNA, 1110 bp, human herpesvirus 2
atgagtcagtgggggcccagggcgatccttgtccagacggacagcaccaaccggaatgccgatggggactggcaagcggccgtagctattcgcgggggcggagtcgttcaactgaacatggtcaacaaacgcgccgtggattttaccccggcagaatgcggggactccgaatgggccgtgggccgcgtctctctgggcctgcgaatggcaatgccgcgggacttctgcgcgattattcacgcccccgcggtatccggccccgggccccacgtgatgctcggtctcgtcgactcgggctaccgcggaaccgtcctggccgtggtcgtagccccgaacgggacgcgcgggtttgcccccggggccctccgggtcgacgtgacgtttctggacatccgggccacccccccgaccctcaccgagccgagctccctgcaccggtttccgcagttggcgccgtccccgctggcagggttacgagaagatccttggttggacggggcgctcgcgaccgccgggggggcggtggccctgccggccagacggcgcgggggatcgctggtctacgcgggcgagctaacgcaggtgaccaccgagcacggcgactgcgtgcacgaggcgcccgcctttctgccaaagcgcgaggaggacgcaggctttgacattctcatccaccgagccgtgaccgtcccggccaacggcgccacggtcatacagccgtccctccgcgtattgcgcgcggccgacggaccagaggcctgctatgtgctggggcggtcgtcgctcaatgccaggggcctcctggtcatgcctacgcgctggccctccgggcacgcctgtgcgtttgttgtatgtaacctgaccggagtcccggtgaccctacaagccgggtccaaggtcgcccagctgctcgtcgcggggacccacgccctcccctggatcccccccgacaacatccacgaggacggcgcattccgggcctaccccagaggggttccggacgcgaccgccaccccccgagacccgccgattttggtgtttacgaacgagtttgacgcggacgcccccccaagcaagcggggggccggggggtttggctccactggcatctag

SEQ ID NO: 662 - DNA, 1119 bp, human herpesvirus 2
atgcccggccgctcgctgcagggcctggcgatcctgggcctgtgggtctgcgccaccggcctggtcgtccgcggccccacggtcagtctggtctcagactcactcgtggatgccggggccgtggggccccagggcttcgtggaagaggacctgcgtgttttcggggagcttcattttgtgggggcccaggtcccccatacaaactactacgacggcatcatcgagctgtttcactaccccctggggaaccactgcccccgcgttgtacacgtggtcacactgaccgcatgcccccgccgccccgccgtggcgttcaccttgtgtcgctcgacgcaccacgcccacagccccgcctatccgaccctggagctgggtctggcgcggcagccgcttctgcgggttcgaacggcaacgcgcgactatgccggtctgtatgtcctgcgcgtatgggtcggcagcgcgacgaacgccagccggtttgttttgggggtggcgctctctgccaacgggacgtttgtgtataacggctcggactacggctcctgcgatccggcgcagcttcccttttcggccccgcgcctgggaccctcgagcgtatacacccccggagcctcccgacccacccctccacggacaacgacacccccgtcctccccccgagacccgacccccgcccccggggacacagggacgcccgcgcccgcgagcggcgagatagccccgcccaattccacgcgatcggccagcgaatcgagacacaggctaaccgtagcccaggtaatccagatcgccataccggcgtccatcatcgcctttgtgtttctgggcagctgtatctgcttcatccatagatgccagcgccgatacaggcgcccccgcggccagatttacaaccccgggggcgtttcctgcgcggtcaacgaggcggccatggcccgcctcggagccgagctgcgatcccacccaaacaccccccccaaaccccgacgccgttcgtcgtcgtccacgaccatgccttccctaacgtcgatagctgaggaatcggagccaggtccagtcgtgctgctgtccgtcagtcctcggccccgcagtggcccgacggccccccaagaggtctag

SEQ ID NO: 663 - DNA, 1467 bp, Francisella tularensis
atggttgaattaaaagtacctatgttcccagagtctgtagcagatggcacattagctcaatggaataaaaacgaaggtgactttgtaaatgagggcgatatcttggcagagattgagactgataaagttgttctagaagtacctgcaacatctagtggtgttttaaaagggataaaaaaacatgctggtgatacagtgctttcagaagagtcattagcgatcattgatactgctgtttctacatctgaacctaaccaacaaactactaatcaaggaaatgcttcagaagcaactgctactgggcaagaaattgatattaaggcgcctgtatttccagagtctgtagcagatggcacgatctcagagtggcataagaaagagggtgaggctgtttctgagggtgatatcttagcagagattgagactgataaggttgttctagaggttccggcaacatcaaatggtgttttgacaaaaatattaaaaacagcaggagagactgtactatctgcagagcttatcgctaagattacagcaggaggcgcaactgctactacgaaatcagaagcttcggtgggagtttctcaagcaaataatgatccgcatctagtaccttcagcacgtaaagcttttaatgcaagcggcttggatactgctgctaatatcgaaggtacaggtaaaaaagggcgtataacttctgaagatgtcaaaaaagcagttgcatcagtaaataaacctcaacaacagacagttgttataaatcaaggtgctagatatgaaaaaagagtcaagatgactcgtctgcgtcagactatagcaaataggttagttgaggttcaacatactaatgcaatcttaactactttcaatgaagtagatatgagtgcagttatggagcttagaaacaaatataaagatatgtttgtcaaagaacatgatactaagcttggctttatgtctttctttatcaaagcagcaacagaagcacttaagaaattcccagatgtaaatgcctctattgatggtgatgagattgtttaccataattattttgatattggtattgctgtaggtactgataggggtctagtggtacctgtactaagagatacagatactaaatctctagctgaattagaagccgatgttttagacaaagcgattaaaggtcgtgatggtaaattaagccttgaagatatgcaaggtggtacatttacgattacaaatggcggaacttatggttcgatgttatctacgcctattattaattcaccgcaaagtgctattttaggtatgcataatattgttgagcgtcctgtagttgttaagggtgagattaagattcgtccaattatgtatttagcgttatcttacgaccatagaatcattgatggcggtacatctgtaagattcttgaagatgatcaaagagctaattgaagatccaaatagaattcttctacaagta

SEQ ID NO: 664 - DNA, 1011 bp, Francisella tularensis
atgttgttaaaaaataattatttagtaagtattatattagtagtactaattatgatagttacaaaatcatttgcttgtgctgctacagattacaataaagtcgctttaattaatgtatcaacacaatattatccgaatgacataaaacaagcagagaaagcgcttaaagacaccggatataatactacttataaatatttagacatatatccttctgattttggatattctaatccagattcaataagagctaaaatattattagatgctcttttagataaaaatatagatattatttggttcttaaaaggaggaggtggagcatttaatttattaccttatctatatgatcatataaatgagcttaaaaaagctaaacctaaaatattagttggatttagtgatgttacagctatacatttttttgttaataatgtactaggatggaaatcattacatggtgtagtagctgcttataataagaatgcttatagctcacaaaaaataggaaaaattagaatcaatgacttagaaagaattcctaatattacagaaattataaacaatggcatatcatatgataaattaatgccaatgaataaaatggcttataatggtattgatggtagtattgttggaggtaatatgacgttgatatattcttatttctcaaccgtttaccaacaagatatctcaacaaaaattctatttcttgaagatactggcatttcatttagacagttagataggtcactacatcagttactttatctgccagaaaataaaaagcctgaagctattatatttggccagttttatccattagaccctaccgatgatcaaaggctcatatataaaactgtaattaaaaagtttgccaaaacttttaatagacctgtatattattttccttttataggtcatggacaatacaataaacctttattgcttggagttacatccaatattaaatgttctaaagaaactatattttgcactttaaaacaaaaa

SEQ ID NO: 665 - DNA, 1371 bp, Francisella tularensis
gtggacgttaagaagacttttttaaacattaaacaaaaaataaactcaagcaaaagaaactatgctatttttgttatcgcaactataattctagcctggcttgtgcttggaaaacttgggatatcattagcaattgtatattttatcttccaaattaactatatcaagaataagctccataaacttaaagataaaaaaactgcatctattgctattgtggttgcaaccctaatcctttttggagggatttttagttttgctgaatttattcaaagcatgattaaaaaaggcatggcagcatatgtaccccaacctgttgcagtaacatcatctgtagttgagaaaactgattggaaacaagttattaacactatcggtgaagctcaagcagttcaatctacagcgatatcttcacagtctggtgggattgttagcgaaattcatttcaagagtggtcaagaagttaaaaaaggtgatctactctttaagctagatactagccaacttaaagccaatcttgaagaagcgttatcaaatcttaaattagctaaaataactaaagatcgctataacaagctcgttgaacaaaaagccacatcaaaagaatctgccgataaggctaatgctgactatctatctgcgctagctcaagtacaaaatatagaatcacaaataggctttaaagaggttagaacaccttttgatggtaagattggtattagaaatattagtttgggacaatatttcaacaatggtgataatgctgcaacacttactacaattgatcccattttcattacattccctgtacctcaaaataaagtaagtatgataagcgttggtcaagaaataaacttctactccgactcatatcctggtgaaacttttactggaaaaataacagctattaactcatttattaatgactccaatagatcaattactgttcaagcaacatatgcaaatcctcatcataagattgttgcaggaatgtttttaacagttcatgttagtttaccagttagaaagaactctattgtaatacctcgtaatgctatttcatatagtctttacggtcaatcagtatttactctagaaccggtaatgaaagatggtcaacctgtaaaagcatcttatacatctactgctgatggtggcatgaaaaccatcaacacagataaaacactatacaaagtaggtcaagcaaatatcgaagtgcttgaaacaagaaataatctagctttagtcacaggtttagaaccaggaacaacaattattacatctggccaaaataaagtccataagggtatgaatgctatcataaacaatagtgtagaaattgacaacaacatatacaagcaaggaattcag

SEQ ID NO: 666 - DNA, 471 bp, Francisella tularensis
atggatttattaaaagcaattgatagagtggctgagattcttaactcaagtgatataaaggaaatcagaattaaagatggtggttcaagcatttttatgacaaaaaataatacagctgctattacaagtgtagtttttgctgcaccagttgctagcaatgttgcttcagcagctccagcagtagctactgctgctacttcggcagcagctcctaaagtaaatctggctgaagaaataagcggtgaagagatcaagtctccaatggtaggtactttctatggcgcatcttcacctgatgctgctccttatgttaaagaaggtcaagaagtcaaaaaaggcgacgtattgtgtatcatcgaagcaatgaaaatcatgaacaaaattgaagcagaaagagcaggtaaaattgttaaaatcatcgctaaagatggtgagcctgttcaatttgatcaacctctatttattattgaa

SEQ ID NO: 667 - DNA, 276 bp, Francisella tularensis
ttggtggagtttttgctaaataaaaatgatattaagatgagtagtttattagatattggatgtttgtttttaattgccttgattattacttgtatattttcaaaaggttatttgagatattttattgttgcattaacgattgtctattatcttataggtaatggggttttagggaccattttagccttaccacttaaatcagaatctactgatataaaagcttgtgcaaacactaaagggattatcctcttaggtgctggtatcaataattttcgg

SEQ ID NO: 668 - DNA, 717 bp, Francisella tularensis
atgaaacataaattattttataagttatttattttatttgcatttctatttatcacactagatagctttgcagagagtttcaaacagtataatgtttatctaatcccagatactacagctgataaatatgttaaagaatttgatgattctttagctaaaacaaatgtactagagaaatacaaaactacgccttttatcaaaaaccatcctgtacatttgacattatatttaacaagttttcaaagcaagtatattaaagatattaacagtcaattagctaatcttgctaagaatacagaaccattttatatagaaaccaatggttttagtgctggtaaaagtggttttgtaatgcttgatatcaaaaactctcaatcattacagcaattatcaaacgttgttataaaagacttagctaagtatagagataaagactaccctgctccaagctggattaaattctatccaagtaaattagtatcttttgaaaaatatggttcgccaaatgcttttgcagaatttaaccctcatataagtatattagccgctaatttacaaacagatcaagaaagagataactttgacaaagattttaatgagattattaaaaatacgaagttagaaccaattagctttaagattaaagcaatcggttttggtgaagttgatgaaaatgggcaagtaactaaaattctacatatttataaactaaataag

SEQ ID NO: 669 - DNA, 687 bp, Francisella tularensis
atgaaaaagagtattatcccaattactttaataagtatttttgcaacgacatcgcttgctatagcttgtgataatgattatttagatcataatacaattaaatattctactcaagccgaaactacagtaaagagtgacagtatacttgttcaggttacagggtatgcaacaacaactcttgaaaaacaaaatgatgtagaaaaacaaatttcagataatgtaaataatattgttaaatctgaatggaaagtgaaaaatattgagcaaactactagtaatagtggcacaattaatataactgttaaactacaagcgagaatatcgcaaagtgatcttaataatctgcaaagagcatttgaaaaccaaaataaatcttcaggtatgagattagttgtagatgtattagattacaatcctcctgctagagatatacaagtggctaaacaaaaactgatgataaagctttttaatgatactaaagattaccttgctaactttaataaacaaactaatagtaattatactattcaatctatacaatatattgatgttgataattatcaacctagaaataatttagtgttaatgaaaacggcttatagtggtgatgcaaattcaaatagctctaatccagtagccgtaactcaagatatcaatattaaagcaaatgttacatttatggagaaa

SEQ ID NO: 670 - DNA, 1893 bp, Francisella tularensis
atgagaaaaattaaaactattttattagtaaatatcttattttctattttatatatcaatatatcatttgctaattttgctaaaaatgaagatatgggtgcaaactatgaatatgttaataataatatttttatcgataataattataaagttgattggactgtggaggagcaaataaatattttcgatgaaaccgctagaaattactataaacttgttcaattatattaccttgaaggttttgaaagacttaaggttatcaatgcaagtattgaaaataataacaagaaatatgaaatcgataaaagtttaattgaagataaaaatcttgctagtgaaataaatggcttcacaaatacaagacagatctctattccttttaaaaaaattcaagtgggtagtaagattaaaataaaatatcatgacataatagaaaaaccgatcttagataatcatttctcaacaactttgtattatgggagtgatattcttctaaaaaattcaataactactattaaatctaaagttcctttatatatatctactaatgacccttttggtgttttagagttaaattattttgaaaaagataaaacttattattatagtattaagcttctaaagccaattaatagtgtcactgttaacgagccagaaaatagtattttaagctccaaaaagcaaacatgggttagtatatctactgatgtgacatatgagaaaataaatgaaacacttgtgaataaatatgaaaaccttatacatcaacaaatccgtgatgaacttttagacgatttacaagcattaaaccaacaaaaactaaaacctgatatagaaattatagataatgtaacaagcctaattcagaataagataacatacctaggaggttggaaaaaaatcgatgctggtatttatccaagaacaatggaagatattattgatactggttatggtgattgtaaagattattctttgttgacaatcgctagcttaaggtatttaggactgtctgctagatttgctctagtaaatagaggcgagataattcaagaatattctgataaaaccctgcctagtattaataattttaatcatgcaatagtatatgttaaaggctttgatgaaaaagagtattggattgatccaactaataatattagtatgacaaatggattatttcctgatatagctaatcgtaaagcattaattctagatcctgaaggttttatttttactcaaattcccaacattgattataaaaaatctaaaatagtttcaatctttaaatatgatttagaagaagatcttatttatgttaaaaaggatattactcttaaaaaagaggctgctattatgtttaccggattagaattatttacaagcaaagatattattgaggatagcatctataacagtttccttgaagatgaaagaagcattcctaaatcgcaaagagtcaagtctgttattccaaatttaaactctaggatagttaaaaatatagatttctcgttcgaatatatattagataacccatatcttgtaagtaacttaggaaaattattatcattaaacagtaattatagttttatcagtcctccagaagatagtgtaaatgatatatatataggccctcctattactgtaataaaaaagtatatctttaatacaaagattaatggtatagataaattgaattcgacactatcaacaccatggatagatttaaatagaaaagcatatataagtaaagatggagagagtattatagaacagcaatatataattaaaaagtcttttttaagttttgaagataggcaatcagaacaatataaactcttgaaaaaaggatttgataagtcatttaaaaggttatttttaatactaagc

SEQ ID NO: 671 - DNA, 354 bp, Francisella tularensis
atgagaaaattattattgtcactatctgcaatcgtattatttgtgtcaacttcatttgcacaaggagcagagcaagctgctggtagtccgttaagctcaatcttaatgctagtggtattttttgctatattctggttcctattaatcagacctcaacaaaagaaaaacaaagaattgcgtaagatgctatctgagctatcaaaaggtgatgaggttgtaactaacggtggaatggtaggcaaaatcgctaagatagatgaaacatttgtagatttagaagttgcagataatgttactgttaagattcaaagaaatgctgtagcaaatattttacctaaaggtgctactaaagct

SEQ ID NO: 672 - DNA, 414 bp, Francisella tularensis
atgcagcgacttgagcttaaagtatcgccaagataccgcaatattatttatgcaagtttagtgtttattagtggttttgtgattgctagttactttggtaatactattattggttattttgggtttttgttgattctagtttcgctattttttgtgataatagaaggtaagttttttcttgaggctatcattatcccgaatcaattagagagtacttcactaatatttgtaattaatggtagtgaaactgatttttggcttattaggaaacatattgttataaatggctggatatttttatatgctattcaacaaggctcaaataaaaaagtaaaaatgtggctgcataaatctaattttaaacagcaaaatgatattaaagtattagcaaggtatattttatttaaccaaaaa

SEQ ID NO: 673 - DNA, 582 bp, Francisella tularensis
atgattataagtaaaaagaaaggcttctctttagttcagactatggttgttatttctatcatgacaatacttatgatggcggcaattagctcgtttactttttactataagacttttgctgaaacacgcttaactaatttacaaaagttaatagaatatggtgtcattaaagctcgtactgataataaaactgttattgtatgcgcagcgacaccagatagttttgatggaactggtaagttagatggaaacagttttgcatgtgcaaactcaacttcatgggttgatgatcctatcgtagcatttgagagcgctgatggaactgatatttataatggtgctgaagatacaataatagctaatatgccacaaggacatggtggacatatctatgttaacctggcaggaaatcctagttctataaggattaatccaaatggatttatggcaacaggtaatggtaatatcacttattgtgataaatcaaataagtatcaggcagcactgattacaaatctagttggtagggtggtttatactgatagccctactaaagatggtggcggattgtatacctgcgaa

SEQ ID NO: 674 - DNA, 1893 bp, Francisella tularensis
atgtctatagagatagttaaagtccctgatattggggattatgataacgttgatgtgatcgaggttaatgttgctgtaggtgatgttattgctgaagaagattcactaattacgttagaaacagataaagcaagtatggaggttccatctccatttgcaggtaagatcactaaattaactgtaaaagttggtgataaagtttctcagggaactgcaataatggaagttgaggttgagagtgctgctgatcaagctgctactacacaatcacaacctcaaacaactagttcagctcctgtagctgctacgacgaacctgattgttgatgtcgaggttccagatattggcgactatgatagtgttgatgtgattgaggtgtctgtaaaagtaggtgatgagatagcagaagaggattcgctaattacgcttgaaacatataaggctagtatggaagtaccatcgcctgtagcgggtaaggttgttgaagttattactaaggttggtgacaaggtttcacaaggtagcttgattttaaaggttgaaacaggctctagtgcacaagctccagctcaagaacagtcacaacaatctgcaccagttaaatccgctgctgaagaaattattgatgtaaaagttcctgatatcggtgattacgatagtgttgatgtgattgaagtatctgtagctgttggtgataagattgaagaagaagattctttgattacattagaaactgataaggcaagcatggaggttccgtctccagttgctggtgaagttgttgaaataatcacaaaagttggtgataaagtttcacaaggtagtttaattcttaaggtcaaaacacaaggttcagcaccggtagagcaaactagttcacaaccagcgccagctaaacaagagcaagctaaacagcaagctgctacacctgctgctccaacgccagcatcaagttcggtaaatgagtatgctgtagataattctaatgcacatgcgtctcctgcagtgagaaagctagcacgaattctaaatattgatctaagtaaggttaaagctacagggcgtaaaggtcgtgtaacaaaagaagattgttataactatattaagcatgctgtcacacaagttcaaactggtaaggtcgctgctagtggtagtggtttagatcttttagatgatcctgttgttgattttgctaagtttggtgagattgaaactcaaccattatcaagaattaacaagattagtgctaagaatttacatcgtaactgggtgaagattcctcatgttacattctatgatgatgcggatgtcacagacttagaagagttcagaaatgctaagaaagcctttgctgagaaaaaaggtattaagattacacctttatcattcttggttaaagctgctgcagttgcattacaagagttcccaagatttaatagctcattatcaaatgatggtgagaacttaattatcaagaagtattataatattggttttgctgcagatactccagctggtttaatggttccagttgtcaaagatgctgataaaaagggtatcattgaaatatcaaaagatattatggagttggctggcaaagctcgtgatggtaaacttggcgcaaaggatatgacaggtgctacatttactatctcaagcttaggcgtgttaggtactacgtcatttacgcctattataaatatgccagaggtggctattatgggtgtatctaagacagcagtgaagcctatttggaatggtaaagagtttattcctagaactatgctaccattatcattatctacagatcatagagtgatagatggcgcattagcagctaaattcttaactagatattgtcagattttatctgatttacgtgaaatcataatg

SEQ ID NO: 675 - DNA, 606 bp, Francisella tularensis
atgaaaaagaaacttttatttataactatatctgctagtttagcattagcgcttagttcatgtggcaaaactactgtagcatatgaggatccaaatggtgttgatgcaacatcaataaattttagttcaacatatttacaagctatcacaaataagatggctgaagatatgcttaactcacccgcagttaaaagaattactgctatggatacacctacattattctttagtaatatccgtaatgagactcgtgagcatataaatacgactatgttgtcaaacactgctcaaacacagattataaaatcggggctattccaagttacagatatgtctcagatcaaaaatgttcgagagcagcttggctatcaagcaaatagtggaatggttgaccaagctactgcaactaagattgggcagcatattggtgctagatacatggtttatggctctatccaagatattgataatactaatgttgatggtgataagagatctaaattcttcttagctacactgaaaatgatggatctaaaaacaggtcttgttgtatggcaagatgataagcagattcgtaaatctcaaactaaatcgacttttggttgg

SEQ ID NO: 676 - DNA, 1632 bp, Francisella tularensis
atggctgcaaaacaagttttattttcagatgaagctcgtgcaaaaatgctagatggtgttaacacactagcaaatgctgtaaaagttactttaggtccaaaaggtcgtaatgttgttttagataaatcatttggcacgcctactatcactaaagatggtgtatctgttgctaaagaaattgaactagaagataagtttgagaatatgggtgctcagatagttaaagaagtagcttcaaagacagcggatgttgctggtgatggtactactacagcgactgtacttgctcaggcattattgacagagggtctaaaagctgtcgctgcaggtatgaatcctatggatctaaaaagaggtatcgacaaagcaactgctaggttagttgaagaattaaaagcactttctaaaccatgttcagatccaaaatcaattgagcaagttggtactatctctgctaactctgatgctactgtaggtaagcttatcgctgacgcaatggcaaaagttggtaaagaaggtgtgattacagttgaagaaggcaaaggctttgaagatgagcttgatgtagttgaaggtatgcagtttgatagaggttatctatctccgtattttgcaacaaatcaagagaatatgactactgatttagagaatccatatattctaatagttgataagaaaatctctaatatccgcgatttattaccgatattagaaggtgtttctaaatctggtagagcgttactaataatagctgaagatgtagaaagtgaagctctagctactttagttgtaaataatatgcgtggtgtagttaaagtatgtgctgtcaaagctcctggctttggtgatagaagaaaagctatgctagaagatatcgctactctaactggagctacgtttgtatcagaagacctaagcatgaagttagaagaaactaacatggagcatttaggtacggctagtagagtacaagtaacaaaagataatacaacaattattgatggtgctggtgaaaaagaagctatcgctaaacgaataaatgtaatcaaagctaatattgctgaagctaactctgattatgatcgtgagaagctgcaagaaagattggctaaactttctggtggtgtcgcggtgataaaagttggtgctgttacagaagctgagatgaaagagaagaaagatcgtgtcgatgatgctttacatgctactcgtgcggctgtagaagaaggtattgttgctggtggtggcgttgctttaattagagcacaaaaagcattagatggcttaacaggtgaaaatgacgatcaaaactatggtatagcgctacttagaaaagcaatagaagctcctctaagacagatagtatcaaatgctggcggtgagtcttctgtagttgttaaccaagttaaagctaatcaaggtaactatggttataatgctgcaaatgatacttatggtgatatggttgagatgggtattttagatcctactaaagttactcgttcagctctacaacatgctgcttcaattgctggacttatgatcactacagaggcgatgatcggtgagatcaaagaagctgctcctgctatgcctatgggcggtggcatgggcggtatgcctggcatgatg

SEQ ID NO: 677 - DNA, 1527 bp, Francisella tularensis
ttgcaaactacccttatatccataatgagtaataaggtattagatacatattataaaaacaatcgacatatttgggtgctagtactatctggtgctgttataggcacaatgattggtcttctagcaacagcatttcagctactcctagactttatttttaaaattaagctggctcttttttctttcagtggtggtaatctttttatcgaaatcgctatgtcaatatcattaagtattgtgatggtattaatttcgatttttattgttaaaaaatttgctaaagaggctggtggtagcggtatccaagaggttgagggtgctttaaaaggctgccgcaaaatacgtaaaagagttatgcccgtgaagtttataagtggacttttttcgttaggctcaggtttaagtttaggtaaagagggaccatcaattcatatggctgctgcattagcgcagttttttgttgataaatttaaacttactacaaaatatgctaatgcggttatctctgctggggctggagctggactagcagctgcttttaataccccactttctgggattatctttgttattgaagagatgaatagaaagtttagatttagtgtttcggcaataaagtgtgtgctagtagcatgtatcatgagtacagttatctctagagctattatgggtaatcctccagcaataagcgtagaaactttcagctcagtaccacaaaatactctttggttatttatggtattagggattatatttggttattttggtttactatttaacaaatccttaatcaaagtgacaaactttttctcagaaggctccaagaagaggtattggactttagttataattgtttgcataatttttggtattggtgttgttctatctccaaatgctgttggcggtggctatattgtcatagcaaatactcttgattataacttatcaatcaagatgcttttagtgctttttgtacttcgttttgctggagttattttctcatatggcaccggcgttactggtgggatattcgcaccaatgattgcgcttggtactgtttttggactagattatggtttatcagtggcgcaactcttccctcagtataatattgaacctggagtttttgcagttgctggaatgagtgcactatttacagcaactgtaggtgcaccattaacgggtattgtactagtaatggagatgacttggaatttccatcttttacttcctttgatgataacttgctttagtgcatctatgctgacctatattcatcatcaaaaaccaatatatgataccctattaagacgtactatttctaacgaaagaaaacaacaagcaaaggaaaaaatgagcgcaatcaaaagccaactccaaatacttcaggacaaactatctcaaaagaagaaatataatcacgcaatttctctaatgcactgggacttagaaacacaagcccctaaaaactcaatcaacacaacatctgaagttattgggtttttcagtgaaaaaatctatgaaata

SEQ ID NO: 678 - DNA, 1302 bp, Coxiella burnetii
atgaaccacgaaaatcaggaatcttctgcccgccttttgttcaatcgtcgtgtcatgacggtgctgttcctcagtttttcttccacgttgccgcttgtgttgctaaccggaactttacaagcgtggtacaccgcggccggcgttagccttatggtcattggaagcttgagccttttgcaatacgcttatttggttaaatttgtgtgggcgccttttatggatcggtatgcgccgctcggattggggcggcgacgaagttggattttgttaacgcaaatcagtcttgccggagcgctggcggttatggcttttatgaacccggcgtatcatccgtgggaattattttggctgtctgccgtggtggcgtttatttctgcttcgcaggatgtcgttatcgatggctatcgagtggatgttttgcgccaaaaagaacgtggctttggggtggcagtgacgacggtcggtggtcgaatggcgatgttggtggggggcggattagcgttaattttggcggcagattatggttggcgggccacttacttaaccatggctttattaatgctgatccaaattattccgactttgaccgcacctaatcctgaaaaaccggtctatcctccggtaacgctgcacgctgctgttgtggcgccttttcgggaattgttgacccgtaaacatatcgttatgattttgctgctggttttaatttataaatttggcgatgcactcgctttagctttaaacacgacttttttaatgcgcggcgttggttttacgctcttagaattgggttatagttataaattaactagcgtaatcgcttcattattgggtgggtttgccggcggattttttatgccgcggttagggctttatcgatcgctaatggtttttgggtttttacaaaccgtgactaacctttctttcatggtgttggcgttggtagggaaaaattttcccgtcatgataggatcgattttttccgattatttttgcggcggcttatcaacagccgctttcgttgcctttttaatagcgctttgtaagcgggaatactctgcaacgcaatatgcaattttatcggcattaatggccgtaagtcgcgtggtgattgggcccgtcgctgcttatctcgtcaagcatatggggtgggctcctttttatttaatcactttttttgcgggttttcccgccttattgattttacgctggttacgggaccggattgattttagcgcggatacgctgcatttaaagggaaacccatcccaaaaaccttctcctcgcagggtagccatataa

SEQ ID NO: 679 - DNA, 696 bp, Coxiella burnetii
atgtcggtaaaaaaactagtaacacttgctactctcactatggctagcgttggtgtcacttccgctgcattggcgggtggtcctgattatgtacctgctcccagctacgcgggcgtttatcttgaaggtaacttgggttatgcataccgtccgtggcggaaggatgcaaccactgttgtaggtctcgcgaaacaagctagacttttaggaagttcttctcgaggcaacggtggctttactttcggtgcggatctcggttatcaatttaaccagtacttcgccgttgaaggcggttggttctatctgcctaaagtgaaattcacaaccactggcgttgtaaatggacttgcggcaggaacatacacagttaaaagcgggatggcttacgctgcattgaaagggatggcgcctgtttatgaaaacacttatgttttcgggaaattaggcgttgcttacacctacaatcgagctaacgccggtctgccgactaataaaattccggcaaccttcggttcacgttccagattttggaacccgctgtttgccgccggtgttcagtactacttcacacctaactggtctgtgaatgctcagtacacgttcgtaccgggctatcgaaatgcttcatctaagcgttttgtagcgccagttacccatctgttcaccgtaggccttggctacaaattcttaatgtaa

SEQ ID NO: 680 - DNA, 615 bp, Coxiella burnetii
atgaataaaaagaaaactaatattcccaaggagcgatgcgcctgggtaagcaacgatcctctttacattcattatcatgacctggaatggggagttcccatctatgacgaccgattattgtttgaatttttaattttagaaggaatgcaggctggtttaagctggttgactattctaaaaaagcgaaacaattatcgagactctttcaataatttcgacgcatcaattatttcaaagtacaacccgcgtaaaatagaccgcttattagaaaatgctggcattattcgcaataaattaaaaattcaagctaccataaacaatgcaaaagcgtttttggaagttaaaaaggagtggaggaacttctccgattacatttggcattttgtcgatgggcatcccatccagaatcagtggaaaaatgccaagcaaatacctacccgatcagctatctcggatgttttgtccaaggatctgaaaaagcgaggatttaagtttgttgggagcacgatttgttatgctttcatgcaggcggtggggatggttaatgaccatacaacgaattgttttcgctacgaagaaattaaaaacttgccaatcttgctgtccccagcgtaa

SEQ ID NO: 681 - DNA, 579 bp, Coxiella burnetii
atgactttacttatcatcctcctaatcttaataatattaatcggtggttatgccatttctatttataatcatttaattggcttaatcgaatctatccgcaacaacaataaacaaatcgatatccaactagatcgtcgttataaagttttcgaatctttaattgaggtggttaagaaatacatggattacgaacgctctacattgaaagatgtggttgctttacgtaatcaagcgcaaacggcaaaacaagcaggggataacgacgcgcgtatgaaagcggaaaataaaatatcgacaatattatcaggattacatgttgtttttgaacaatacccggatttaaaagccaaccaaaatgcctttcaattacaagaaactattgtaagcacggaaaataaactggcgtacgccaagcaagcttacaacgatagcgttgagcgatataatgcaaagaaaaaaatggtttttccttcaatggtggtcagtgcatttcccagtaagttgaattttgatttcccttattggcaattgccacctgagaaaataattaagcaagaagattataaagtaaacttgtag

SEQ ID NO: 682 - DNA, 1023 bp, Coxiella burnetii
atgaaaaaagaatttttaaaaacccgaacacctgcgaaattaattctttccggcgaacacgccgtggtttacggtcaccccgcgctttcagtcgctattaaccgttacatggaagccacggtgcggtggtctttaccgctgcatttttcttttcattttatgggaattgattttcgccgggaagtcactttacaggcacttcgcaacttaaaaagaaaacttaaaaagcaataccataaatacagcttgggtcacctgagtattcgggaagtgctgcaaaaaccttttgaattgtcgcttttcacgttcattaacgttcttgatcgattaaaaaataaattgccaacgggcatcgatatcgtcactgattccaatattcctgtcggttgtggaatgggttcctccgctgccagcgttgtaagcttgatctatgcactgacccaatttcttgggatggatttacatttggaggactatttatccctcggtgtggaatcagaaaatttgcagcatggctattcaagcggtctcgatgtacataccgtctatcacggcggttgcctgcgctatgagaaagggcaatttgaaaagcgtcctatccctgatttcccaatgcaattaatacaaacgggctgcccacaaagcagcaccggtgaatgcatctccgaggccgctcctttttttaagaatagtaaaattggcgaagatttttctgcggtgactaatgcccttgatcaagctttacaaaatcacaataacgacagcattaaaggctgcattcgagaaaatcatcgactattgcgatcgatcggcgttgtccccgataaaattaataactttgtcattgacgtggaaaaactcggcggtgctgcaaaaatttgtggcgctggtagtgttgttggcgataatgggggtattgttttagtcatcgctgatgatctcattacagatttagcaaaacagtacggttactccatcattcccattcaaaccgacagtcaagggacttgtattatcgaataa

SEQ ID NO: 683 - DNA, 498 bp, Coxiella burnetii
atgattaaacgcttgttatctgctatctgtttatctgtagccatgatttggagtgtagctgctgttgcccaaacggttgggcttgtcgatatgcgtcagatttttcaaaccgcgccgcagattaaggacatcaatacacgattagaaaaacaattttcgcctcagcgagaaaaaatgactaaattaactcaatcactgcaacagaatcttcaaaaattaaagcgcgatgaagcggtgatgggtaaaaaagaggctgaaaatttgcgtaaagaaattcaaaatgatgaaagcacgcttcgccagcaacaacaacagtttcaacaagaactattcgtggcgcaaaataaagctatgtctgactttatgtctaaggttaacggtgccgtaaagagagtggccgagagagaaaatctcgatctcgttttgcctaaagataccgtactttatgccaaaaacagtaaggatattacttcaaacgttgtatcagcattgaaataa

SEQ ID NO: 684 - DNA, 1146 bp, Coxiella burnetii
atggaaaaaactacgtgcaaatcgttaaaaaatcaatacctattccactgttttttgagcattaaagacccgcgtgttccagggagatgtatttacccattgattaatattctcctcatcacgctttgcgccttgatttgtggggttgatacgtggaaagggattgccgactttggtaagaaacgctatcggtggctcagtcaatttgtcgatatgcgctgtggggttccaagcgcactgacttttgcgcgcgttttttcattaattgaacctgaacaattccaacattgtttgtcggcttggatgagtcagttttttcaattgttgcgctttgacatgattcatctggatggaaaaagcctttgtggttcagcgaggagaggcaaagcacaaaaagcaacccatattgtgaatgcgtaccttcccaaagaacaagtgacgctgggagaagttcgggtgcccgataaaagcaatgaaataaaagccatacctattcttttaaatagcttgaatgtccaaggctgtattatcagtatcgacgcgatggggactcaaaaaggcattgctaatttaattcgcttaaaacaggccgactatgtactggcacttaaaaaaaatcacacacgattttatcgttatgtggaacgattgtttagctgcagtgatgagagagattatcaaggcatgtgttatcgcacagaagaaaccaaggattatggccatgctcggattgaagaaaggagctattgtgttttgccgatgatgtatcttcataaatacaaaaaatattggcgtgatttgcaggcgatcgttcgtgttcaatcaaaacggcataaagggaatgaaatagaaacggccacccggtattacatcacttcattaccctttgcagaacatagaaggatgtctcaagccattcgtcagcactgggctattgaaaatcaactccattggaaattggatattggtttgggcgaagacgcctctctcattacgcgaggctatgccgatcagaatctcgcaacgcttcgaaaaatggtgctaaaaatgctggaaaacgaaaactcttccaaacaggggatcgctggaaaacgcatacaggccgctctttctacacgatatttaagaaaagtggtagggttttga

SEQ ID NO: 685 - DNA, 285 bp, Coxiella burnetii
atgccgaaagaaactaaaaccgactctattaagcaagagttcgctacgtttagtgacgatgtcgctaaattacggggcgatctcagtagtattattcacaaattaacttcatttagcaaaacggaggctagcatgatgaaaaataactttgtcaatcgaggaaaggatgtcattcattcagtagaaagcaaatgcaaaaagaaaccgttagcaactctcgggtacgcattcggcgctggaataatcactggaataattagccgcaagatcgctcgaagaaaatga

SEQ ID NO: 686 - DNA, 168 bp, Coxiella burnetii
ttgccgccagtaataaagacccaaaattttaaagcccgccatgccggcaaattcgtcactcccgcgcaaattcgtcatccccgcgcaggcggggacgtgcgcagcgcaccttcggtgctgcctcggcctgacggcacattcaaggaggaattgcaccagttcgcttaa

SEQ ID NO: 687 - DNA, 1047 bp, Coxiella burnetii
atgaaaaaacgcacaaaaattattatcaccttgggggtggtaggctgctttattgcggctggtcttattttttcacataaaaaagcacaggcaacccccaacaggcctcccctgttagtaaaagaaagtcctgttgaggtggcggatttacccattattgctacagcaacagggacattagtcgctaataaccaaaccaatatcagccccaaagtggcgggctatgtgacgaaaatcgccttttcgcctggggattttgtgacggctggatcggtgcttattcaacttgacaatcagaaacaaaaaaatgacttagcggccgcgaaagccgacgtcgaattaagtgaattgcaataccaacgcgatgctttggctttaaaaaagggacttattttacaaacgaccgtgtacagcgataaagtcagtctcgataaagacaaggccctcgctcagacggatcaaacggcgttgcaagacatgacattgagagcgcctttcagcggctacctcggcgccaagcaattcagccttggcgattatgtcacgccaggacaaaaattagtgaccctcgtggatcaacaaaaattaaaggtagtttacgatttaccgaaccatttcgcgccacaattacaaataggccagccggttactgtcactgctgattttctgccggggcaacgattcaacggtaaagttaattatgtcgccccttatgtaaattctgattcgcaaaccatcgaaacacaggctctattaaataataaaaatggtgccctaaaacctggccagtttgtcaccgtttctcaaactttagaaaccttaaaaaaagctattttgatacctgaaaatagtttatttgcaaacatgaatggtcattacgtgtttaaagttaaaaacggaaaagccatttcaacaccggtcaaagtcggagaacgcctttatggaaaagtacaaattatcgacggcttaaagccaggcgatcacattattacgactggacaagatcaaatttataaaagtggagcaaaggtaaaagtggttcattaa

SEQ ID NO: 688 - DNA, 375 bp, Coxiella burnetii
atgattacaaaaaaaccaataaagaaaccacttatactattagtcgaagataatccgttcattcaaaaaattcatgttcaattgttgaaaaaattaaattgcgaagtgacgttggctatagacggccaatcggctttagctctttattcggataaattcgatctcatttttttggatattaatctttcagacatgaacggtatggaggtttgcaaagcgatacggcaacgcaccagtagcacacccattattgctttaacttcagagagtagtaagaacaaaccccgctatttttccacgggaataaatgattttattaaaaaaccaactacccaagcagcgttaaaacgagtactcaactattggattcagtga

SEQ ID NO: 689 - DNA, 249 bp, Coxiella burnetii
atgaaccaaaaagttaaacgtttataccgttcccgtaccaatcgtaaaatcgctggcgtctgcggcggattagctgaatacttcaatgtagatgcgaccattatgcgcttactcttcatcctagtggtcttgttctcggtagggtttggcatcattgcctatatcttaatgtgggtcatcatgccagaagctccggaagaaaagggaagaacgatagatcacaacgaggttaaaggtccacaagagtaa

SEQ ID NO: 690 - DNA, 1017 bp, Coxiella burnetii
atgagtagacgtgagactcccactagcacaatatcctcaacgccgacaggaactcgaacgccgagaaggagattgagccgaaaaggacatcctgtaagaagaagcccgttaatagcaaagaattcgatatttactgtattcgatttatcgtttgaaatactcataaatgctgtagaagaaaacagcttagacataataaaaaactaccttcgcggggattcttttcatcagacggcgaaatggggcctcaacgtaccgccaaagacggatttccagggtgacacgctcttaataaaagcggccaagaaaggaaagtttcttattgccaaagcattattggaggctggcgcttacaaagagatagtcaataagctaggagaaactgccttaatttgtgcggtacgccattttcgagtagagacgctcgatttattaattcagtatcatgctgatgtgaaaatcaaatataaaggacagaaccttttagaactgactctcgagaaatattccgaaaagactaaaaattttactttgcgcattgtccaatccttagtggctgcaggtgtagaactttggcattctgatggaagtcaaatcatggctagcgataaggaaattgatgaaataattagaaatgccagaaaccttcaaatcataaaaaaggagaaacgagaggcagaagaacgagctcgaacaaaaaaatcgaaacaaataaccttacagcgtatacagcgcgaccttgaatacatcagtaaacgtcttccttttgaagaaaatatattaacaactcctgattttcctcagcttttcttcgagatttctaagttggttgaaattatttccgactctcaaaaagaaaataaagaagaattcgctgaagcttctatttctctgatagatgccttaaaaaactttggtatgatcctggaaaaacgcgatgttccaggagaagtgaaaaaagaagacacaacgctgtctagaaacaactctctctcttgtctgtctagtcctcggtga

SEQ ID NO: 691 - DNA, 414 bp, Coxiella burnetii
ttgaatatgaatcattatttacagttaatgggtattgatgtatggcgtttgcgaacgcctgtttcaaatcactattaccattatgatttgctagatactcaagacaggcaagtcggagtgttgctggctgatgcggtattgaaagacgaaaaagaaagccaactcgttgagaaaattgcaaaagcgacaaaaaaacagattagaggaggtcttaaggaagggaggccaaacccggagaaattggggcaatgcgtcattattttgttagggaatcgcgtaacccaatctttttctcaggtgaactttccgcagataatcacaagtcattcgcctgccgaattactacgcgacggcgatctcaagccaaagacatggaacgctttaaagaaagcaatgcagttgatggaagcgtga

SEQ ID NO: 692 - DNA, 939 bp, Coxiella burnetii
gtgaaacggtatcttttttttactattatctttttcattcctatgcttggtctggctgcggtgtccgaaatgaacgcaagcacaccggtacaatcctttcaagaagccgatagccaaacttcctcaccttcggcggctttacccgtaacccctcaagctgagaagccaacggctaaggaagttccagagttgaacgaaaacaaaagtcccgataatacagctcaaaatcagacacctaaaaatgccacccctacggccattccccctgcttctaaaaagtcggtgcctgaaacaggaccaagtacggatgacgtctctgcatccgctaacgcggttgtgagccatgactcttcggctatgcttcaggcagaacttactcaaatgaaccaaaacagtttgcaatttcagcagcaaacagacggtcgtttggagcaactgaatagtcaaaaccaacaattacagcaacgattacaaaacttggaaaaagtagtgacgttgctcaatcaagaattagtccaactcaaacaaggcagccaccctgtctcccaactacagccccaaaatcctccatcccaaagctcttttaacggatggattgcgtatttaaagcaaattttaggagaaaatgggtatagggcagctatcggtgggatgttcgttgctctacttctaatactgtgggcactttggccgcgtaaaagaaaaaatcaaaaaaaccgcagggttttggatgatcaaccagcgattggcggcgctgacgaagcggaatatgattacatgggaagtgctgaaagtattcccgcgaaaattaatctggctcggacttatattgcgatggaagacccggtatcagcgcgtaaagtgctcaagcaggtaagcgaacaggggaatgaagaacagcgccaggaggccgatgagcttttaaagagcctgccttga

SEQ ID NO: 693 - DNA, 333 bp, Coxiella burnetii
atgagaagctttatttatattttaattttactacttctgatctttgcgtttagcaccttgattaaacgtcacgatcaccttcggcaagaaaattcgtgtttacatatccgtaaaaccttactggcgaaaacattaaaaccgaaagacacttatatcccccagtgtaccctttatggtcattatattccaaagcaatgtaatcaaagcacgggagaatgttggtgcgcgacaatagaaggaaaagaaattccgggtacacggacttcctcagggaaaacgccgaaactgtgcaaactgaattggttttatgaattgtatcgacgaatgcaatga

SEQ ID NO: 694 - DNA, 390 bp, Coxiella burnetii
atgtcaataaattcgattatttttacggcgttagtttgttttgctctaattctccttatcattgccatttctatgtttggtcgagggaaagatcgattagacgattcgtcatggaaaagtgataataacgatcaaatttacgtgggtaatttaccctatcatgtagtggaaaacgatttgcatcaatatttttcccgttttggggcgattgaatctgttaaaattgttagaaattttcgtacgggccgttcaaaaggctatgcgtttgtgacgtacgttactccaaaacaagccgttaaagcgttagacgctcatggcaaagatttacaaggacgatctttagtggttcggattgctaaatcaagagagcagcaacacgcatacacgtaa

SEQ ID NO: 695 - DNA, 531 bp, Coxiella burnetii
atgaaaaaatgtctgttccctaattttttattttttgtttttgtaacgagtgcacaagcttcagttttccaacgggggacttattatgaggtctgtttcacgccgtatcaaaattgcactggggaaattgtaaaaatgattaatcaggcgaagcaaagtatttatgtacaaggttattcatttacctccgatcctattgcgaatgcattagttcgagcaaagaaacgcggagttaaagtgttggtgattttagataaaagtcagttcgcgggaaaatattattcttcggcggggtatttaatccgcaatggaataccggtatgggaggattttcaattggatattgcccataacaaggtaatgatcgttgataaagccgtcgtcgaaacagggtcgtttaattacacggtgtctgcccaacattataatgccgaaaatgtgttaattattcataataaaacgttggcccaccgataccttgctaattggtatcgccgccaaaaagcctctaaattggtgaaaaaatattag

SEQ ID NO: 696 - DNA, 318 bp, Coxiella burnetii
gtgaaaatctgccctgcctacttgcatcgctccaacaagccctgttattttaataataaaagagagattaccatgtcaaaatttttacaccgtttatgggaaggaatcatgccaattgtgggcatgattgttttcgttattctttttatcgtggggatatttattttttcctatcttctaatcatcgctgccgttattggattgatactttttatcatcgcctttattcggataaaattagcacaacgtaaacgacccaaagaacccccttctggtagaatcattgagcacgataacgatagagagaataaatcttga

SEQ ID NO: 697 - DNA, 351 bp, Coxiella burnetii
atgagtctattgagtgtattaggcgtaggggtcgtttatgctgcaccagtcacagctcaagcgccgcatccgggcggtttttggtccatgctgtggttgccgctcctgttaattctggtgttttattttctgttaattcgtcctcaaagcaagcgagctaaagaacatcgacaattgctggaaggtatttctttaggtgacgaggtggtgacgacagggggcgttgttgcaagggtatcgcgattgaaagacaattttgttgtccttgaaattagcaaaggtaccgaaatcactgtacagaaagcttctatagcctctgtattgcccaaaggcacgatcgattcgatttaa

SEQ ID NO: 698 - DNA, 729 bp, Coxiella burnetii
ttgcgcttacaaagagtcttttcattcctttttttggtgcccttttactcggcaatcgttttctatgttcgcttcgtacggcgatacaagataaaaaacaaacacaaaatcagaaaacaatttcggggctttctgaagaaagagcacaaaggtccggtgctcatttgtgcaaaccacctcagttactttgatgcttttggcattatttggggtttaggttcgctctggggatatcttaggcattttcgccgctttccctggaatattcccaatgcaaagtttgcgtgcgctaacttattcaatcgactaatgagttatatgggtaaaatgatccctcttaaaacagaggggggaggatcgaatgcgaaaaccgtattaagaagggttacacatttattaaaacgaggagatttcgctatgatcttccctgaagggacgcggagcgagacagggcgattgaatatggacgattatggttacggggctggtcagattttgcaagctgtccctcaagcaaaggtcttattaatttatttgcggggtgaggaagacaaaatgcaacggtatttaccccagaaaggttgtcagttttatatgaaattaaaatggttcgccccccaaacccaaacgaatcagcagggccgacaggggattcgtgaactttcaaagaagataatggaagagttatgtgaaatggaaaaagagtatttccaggaaattccttcctaa

SEQ ID NO: 699 - DNA, 612 bp, Coxiella burnetii
atggaaatcaatctcccacgttcggacagcgccgcgaagacgcccggtatcctcttgcgcgaggctcgccaggcgaagaatcttcagcaaagcgatgtcgcgaaagagatacggcttagcattcaatgggttaaagatcttgagcaagacgattattctcatgttcccgcgttaatttacgtccgcggttatttacgtggctatgcccgttatgtgggtatttctcccgatgaggtgatggcagcttttgatgagatgggattggaagaagagttcgagcgagtgaaagccgaagtagaaagacccgtgaaacaccacgcggtgcccgtcgtcttaagatcgaaacggatgattaacggcaaaatggttcggtgggttacggttattttattagtggcgctgattgtctctgtgggcgtttggtggcaaggcaaaaaacatattcttgggcaattgcaatcagttatttcttcgccgcaagagaatttgcccttaaaacaaacgtcagtgaattcagtgaatactaataaaacgatcaacacaaatttgacggagcaacccacggccataaaatacaagaataagataactttttcaggaactaatcattga

SEQ ID NO: 700 - DNA, 1218 bp, Coxiella burnetii
atggctatagaaattaaagtacctacgttgcctgaatcggttagcgatgccacggttgcaaagtggtataaaaaagaaggcgattccatttcacgggatgaaaatctagtcgatttggaaacggataaagtcatgttggaggttcccgccccgaaagacggtgtggttgaaaaaatcgtcgcgaaagaaggcgaagtcgttaaagccgatcaaatccttgcccttttaaaagaaggcggcgctgtggccaaagaaaaagaaaagaaagacgaaaaagaaacgaaaaaagaaaaagagaaaaaagaagaaaagaaagataaggaaaaaaaggaaaaaactgaagaaaaagaatctgatctcagtcccgccgtgcgacgtatggtttcggaaaaagacgttgatgtcgaggaaattgaaggaagtggaaaaggagggcggattacgaaaaaagacgtggaagattatttagaaaaacaaaaagagaaaccctccgaaggaaaagaagggcctgccgatgaacgcacggaaaaacgcgtgcctttatcccgcatccggcaacgtgttgcggagcggttagtgcaagtccaacaagaagcggctttattaacgacgtttaatgaaattaacatgcagctggtaatggagttgcgaaaaaaataccgcgaagagttcgaaaagaaattcaaagttcgattgggttttatgtccttttttaccaaagccgtcgttgaagcgttaaaacgttttcccatggtaaacgcctcgatcgatggtagtgatattatttatcacaattattacgacatcggtattgctattggcactgaacgcggattaattgtccctattcttagaaacgccgaaaaaatgaatatggccgatattgaaaaacaaattcgtgaatacgcttctcgagctcaagaaggtcgtttgaatattgaggaactaacgggaggcacttttacaattacgaatggcggaacttacggctcgcttctctcaacgcctataattaatccgccccaaaccgctattttggggatgcataaaataatggaccgtccaacggttgaaaacggagaagtcgtggttcgtccgatcatgcaagtggcattatcttacgatcatcgggtgattgacgggcgagaagccgtgttatttttagtgaccattaaagagcttttggaagatccagctcgaatgattttggagtgttaa

SEQ ID NO: 701 - DNA, 657 bp, Coxiella burnetii
atggatcaaactgaacgtgaagaaatttttcgtcgctttaaagcacgcaatcataaaccggtctccgaattaatttatcattctgagtttgaattattaatttcggtaatgctatcggcacaagccaccgacatcagcgttaataaagccactaaagatttataccgcatcgctaatacgccggccaaggtgttagcactgggtgaaagcggattaaaaaaatacattaaatcgattggcctttataatacgaaagctaaaaatattattaaaacatgcaaaatattagttgaaaactatcactccaaagtaccccgaacgcgtgaggaactggaagctttacccggcgttggccgcaaaacggcaaacgtgattttaaacacggcatttggcgaacacgctatcgctgtggatacgcatatttttcgtgtggctaaccgcaccggtttggcgcgaggaaaaacgccgctggctgttgaaaagaaattaatggaagtagttcctaaaaaatatttagcagatgctcaccactggctagttttacacggccgctatatttgcatagcacggcggcctaaatgttctgaatgcttaattaatgacttgtgtgaatatcccgataaaacgcctctcaacttatccaatcccacggaatga

SEQ ID NO: 702 - DNA, 450 bp, Coxiella burnetii
atgattaaaaaacttattttattcgtttaccgatattcgctaattcgattccttactatcggcgttattgggttgcttattgacattacttttctttatctatttcgacacgaaatgggattaatacctgcaaaaatactctcttatgtaattgcggttacaatcacttggttcttgaatcgctgttttactttccgctcacaagattcgcggcgcgttcaggaatggatgcgttacgcttttatttatgcaataacaggctgtattcatgtattgatgtttactgctctcgtgtatcgttacccagttttgcacacgcatccaatcttcgccttgattattacggcggttgttattgcctttattaatttcggtttcacaaagtatttcgcattcaaaaagcgttcgattgccgagccttctttgttcaattcccatcaagcgatttga

SEQ ID NO: 703 - DNA, 528 bp, Coxiella burnetii
atgtacccgcctcgttatattaaagaaaccttgataaaagatgaaaaattagtttattttacacgcccccattggattatttacggccctggcgtgattgcattaatttttgcggctttattttatacgtatggtcctgcttattttattttgcgctctcgattactgggtggttatccgctttatgacctttgcagtttttttgcgttcgcgttgggcgctttttggttgttgacggcgtatgttacctatcgaacttcggaatacggcgtcaccgataaacgcgtcattatgaaaaaaggttggattcgacgaaactccttggaaatatttttacgccggttagaaggcgttgacgtcaaccaaacggttacggggcgaatcctcggctatgggactctcgtgatcagtggtatgggcggatcgcgcgattattacacgaatgttcctcaaccgctgatgttccgtaagtatgtgcagcggcaagtggacttattgattgatgcatctgaggaagctcagtcttaa

SEQ ID NO: 704 - DNA, 654 bp, Coxiella burnetii
atgtcaaaaatcaagtggtttttaggggtacttgcttttcctttttgctctgctttcgcgcaaacccaaacaataccggattttgtcgggggcattaataggcacaccgctaaaatttgcacccaagaaattgaaaaatcccgttgcaaattaaaagatttattcaccaattataaactttgtgtgcatgaggtgttggtgcaacatccacagtgcaagcagtctcttacgtttttcaactccacggagggcggtatttttaataaaatacgctcatataaaaacatcgatatcatcctagctgattatgtttatattgcggaccaaggcacgggctactttctggtaacccattcgggccaattcattgtactccctttacccattactaaaaaacaattaaaaacaatgtccaattatgaggtaatcgcgaaaaaataccctcatgtgaatgcgtggcaaatactcgattttccccaggaaataaaacttccaagaaatcgttaccgtctcgttttcactcaacaattaaaagatggttgcaatgcctgcgcactcgccggaacggtcaaggtggcttatgatttttccgacgacgggaagcattttgatggaattaaagtgcttaaattaagtccgcaaaatactatctga

SEQ ID NO: 705 - DNA, 1332 bp, Coxiella burnetii
atgcgcttgctcattgttaccatcagtttattcatttcattgaacgtttttgcgagtgaatccacaccccttgtaaatattcaacattgggaaacaaaaaacggtgcgaaggtttatttcgttcgagcgtcggaaattccgatggtggatattcaagtcgtgtttgcggctggttcgtcgtacgatggtcaggcgtgggggttagcttcttttacaaactcaatgttagcagaaggaacgacaacacagaatgcaaatcaaatcgccatggcctttgaccgcgtcggtgctcaatatagtaatggtgttgatcgcgatatggcgatgctcagtttgcgaagtttaacgagaccggattttttgaaaccggcgttaaaaacttttgctgatgtcttgacagaatctactttcccgcaaaaagcttttattcgagtgaagcaccaattgttgtccagtattgaatacaacgaacagtcgccaaacgttgtcgcttcaaaagctttttattcggctatttatggaacacacccgtatgggcatcctccggcgggaacgataaagaccattaatgccataacgaatgatgaagtgaaatcgttctatcaaaaattttacgtcgctaataatgctaacgtagtgattgtcggcgatttaactcgcgaacaagcacaaggaatcgccgcacaagtgattggcgctttgccaactggaaaaccggccccggtgctacccgaagcgataacagcaagcggtgtgttgcggcaacaaatcccttttttagcgcaacaaaccacgattattttaggacaagtggccattaaaccggccagcgctgattatttccctttggtagtcggcaatcaggtattgggaggattgcctttatcttctcttttatttgatcaagtgaggaaccaacgcggattgacttacggggcttatagccaattggcgccgttaaaatacggcggtcccttttatatttctttacagacccgcaaagataaagcagccgatgctttaaaaatcacccagtctgttttacagcattttgtagaaaaaggacctacgttattgcaactacaagcggcgaaaaacaatatcatcggtaactttccgttgcaattgtccacgaatgcaagcgtattggcgaacgtcactaatatggttttttatgggttgcctttggattatttggatacttatcgtcagaatatccgagcggtagatacgcagcaagtgaccgcagcattccagaagactattcgccctgcccagttaaaaatcgttgaagtaggatcgtcaactcctctgaaagggggagaagaatag

SEQ ID NO: 706 - DNA, 1701 bp, Coxiella burnetii
gtggatattaaacgaataattttatatgtcattgttgcgcttttagcgattgcgctgttcaacgcttggcagcgtgactatccaccgacgccgaagccaactccaacggtagaacagccaaccgcgaatggcgatcacccgaccgcttacacccctccagctttcactcccggggcggctgagaaaactaaaaaggcaggaacgattgcctttacgagtaaagtgccggaggcgcggctgatcacggtaaggactgatgtccttgatgtcgaaattgacactcagggtggaaacattgtttcggcaaagttgcctaaatatccggtttctttagaggagaaacaaacgccggtacaaattttaagcggcgaaccgaatgagttgtacattgctcaaagcgggttaacaaatggaaatggtcaaccaacaacggttcaatttgagtcggaaaaaaagcaatatgttttagaaaatggccagaatcagctcatcgtccaactcacaggtcgagcccctgacggacttctagttacgaagacctacacgttccatcgcgatgattatgccattcacttagcctatcaagtgaagaacaacacgtctaaaccctggcaaggcagcctttatactcaaattacccgccgtcaaccaccaacggaacatcaccatttttatgtcagaagttacaacggcgcctctatgggaagtccgcagaccccctatgaaaagctgagctacgaatcgctggataagcaaaatattgatcgaacgagccaaagtggctggatcgccatgcaacaacattacttcctgagcgcttgggtaccggggaaccccgaattaacgtaccactactacagtcacgtgattccagcgagcgatgagcctaatgtttacgtggttggttttgtcagccctcaaatgaatgtggccgcggggagcgaagccgccacgcatgccacgctttacgtcggccccgaaattgctaagcgattaaaggggttggcacctggattggaacgaacgatcgattacggatggctatggccgatttccatgcttttgttttggattctcagcgctgttcatgctgtcgttaagaattggggttggtctattattatcacgacgattctgatcaaaatcgttttttattggttttcagcaaaaagtttccgttcaatggcgcgcatgcgtgaaatgcaaccgcggatacaagcgttgaaagaacggcatggcgatgatcgacaagcgttaagtcgcgcgacaatggagttgtaccgcaaagagaaaattaatccattgggcggctgcctcccgatgctaattcaagtacctgtatttattgctttttattacgttattattgaaagcgtccaattgcgtcaagcaccgtttattttctggattcatgatttatccgttaaagatccctattatattttgcccattatcatgggtttaagtatgttggctcaacaatgggtatcgcccacttcaccggaccctacgcaacaaaaaatgatgtggattctgcccgtgatttttacagtctttttcatcaattttcccgcgggattggtgttgtattggatcaccaacaacgtggtgcagacgctgcaacagtggtatgtcaataaaacgtatgaaagccataaagcgaaattaaaagcgcggcgcgctcggaagcggaaaaggtaa

SEQ ID NO: 707 - DNA, 1308 bp, Coxiella burnetii
atgttttttaaaaagctaaaaacaaaaaaggcaggcgttattgcttgggctttttatgattgggccaattcctcattttcgagcattattctaacgttcgttttcgctgcttactttacagaaaaagtcgccgtgaatcgcattttaggcacaacgcaatggagttatgctgtggctattgcgggatttatggttgcgttattgagtcctttttttggcgctattgctgaccatgaaggccgacgtaagccctgggtcatgttatttgcattgctatcgatattttctgccggcctgttgtggttcgccaaacctgatcccgcttatgtggcttggtcgttaatttggcttattttaggcgaggtggggctggaagtgagtatggttttttacaatgccatgctcggagatttggccccatcccactattggggtcgagtttctggatgggcgtggggattgggttattttggcggacttttcagtttgataatcacgctattcctctttgttcccgggcatgtggcgtggctcaataaaggagaagccgaacagatacgaattgttggccccttcgtagcaagttggtatttcattttctcattgccgtttgtctttttgacgcctgatcgcccaacaaaaggcattacttatcgaaaagccattcggttaggagtaaaacaactctggcaaactttacgtcgattgcccaaatataaagaagtctttaagtttttgattgcccgtatgatttatatcgatggcttaaacaccatttttgctttcggtggaatatacgccgctggggctttcaacatgacttttggccaagtcattcaatttggaatcgctttaaacattgctgcagggctgggagcgattgggttcgcgtggttggatgattacgttggagcaaaacccacggttttaatctccttagtcattatgctgattggcggaatagggatggttctcgtgaaaagtcaattggctttttgggtattaggaatgttgctcagtatcgcggtgggaccagtgcaggcggccagccgctcgttgatggtgagattagcaccggcgcacgtgaggacggaaatgtttgggctttatgccttttcaggaaaagctacggcgtttgtcggaccttggctggtgggagcattcacttttgccttcgacagtcaacgaatcggaatgagcacggtactgtggtttttgcttattggcggcgttcttttattcttcgtcaaggtaccgaaaaagcagcgccgcttaaaaggaaaagaaatcattttgacttcaatgtaa

SEQ ID NO: 708 - DNA, 303 bp, Coxiella burnetii
atgaatatcgctcaattaattgcaagtgtacaaggcctctcagcaatcgctgccggtttatttatcgggctcgccgcgatgggaaccgctattggtttcggaatgttaggcggtaaattcctcgaaggggtggctcgccaacccgaattatctaccatgttaatgattcgtatgtttttaatggccggtttggttgacgcttttgccgctatttcgctggtgatggggttgattttaatttttgcccgaaatccatttttaaatgccgttgttgaagcggccacgcgagcgacgggccattga

SEQ ID NO: 709 - DNA, 99 bp, Coxiella burnetii
atggtaacttttggtcgggataaacttcttgtgccgcatattgttgctatcacaggcatgcgccgctgtggaaagtcaacgctgatgctaaagccttaa

SEQ ID NO: 710 - DNA, 1242 bp, Coxiella burnetii
atgcccctgctggtttgcggcattaatcatcaatcggcgcctttaactgtccgtgaaaaactggtgttcacgcctgagcgcacgcctttagctttacaaagtttactggcagaaaaagccgttaacgaggccctgttgttgtctacttgcaatcgcacagaaatttataccaccgtcgatgaagcggcgactattctccgttggttgtcaaagcaaccgcaattatcgggcatcgaccttcgctctttttgctatgcgcgccgcgacatcgaaatggtgcgccatgtcatgcgcgtaggaagcggattagattccatggtcttaggtgaaccgcaaattctagggcaaatgaagcaagcgtatttattggcgcgccgaataggcgctgtgggcagtgagctaggtcgcctctttcccgccgtttttgcggcaactaagcgtatccgcagtgaaacagccattggagccaatcccgtttccatagcgtatgctgttgtgcagttggcgaaacgaattttttctcatctgaaccagtgtcaaatattgttgattggggcaggtgagacgattgaactcgttttttcgcatctatacaaccaaggcgcgcgtcatttttttattgctaatcgcactttaacgcgggctaaacaaattgcagaaccctatcacgctcaggctattcgtctgtccgacatcccgacgtatttacctaaagtcgatattgttattagcgcgacaatgagtcaattgcctttagtgggaaaaggcgcagttgaaagcgctttgcgccagcgtaaacgtcggcctctttttatggccgatctcgccttaccgcgtgatattgaacctgaaacagctcaattagaagatgtctacctctataatattgacgacttgcaaaccctcatcgcacagaatcgccaaacccgcgaagcggccgctaaacaagctgaggctatggtggaaatgcaggcgatccattatatgcgccaattacaggtgcacaaagctggcgatacgatacgccgatttcgggagcgggtggaaatgcttcgtgatcaggagttggagaaagcactggcgcattttcagcggaccaacgacccaaaagcggtcatcgctcacttcgcccacaatttaacgaataaaattttacatcagccgacaacaaaattaaggcaagcagcgtatgaagatcaggtacaattattattatcagccaaagaattatttgatttatga

SEQ ID NO: 711 - DNA, 1230 bp, Coxiella burnetii
ttgcataaatttcgcctctcgggccgtaaaacgactatacgctataaacaacatatgaaaaaaaacctgattgttatcttaacctctgtattcgttactgtgggtcaattcgccatggcgctttatttgccggctttgcccgctttaaccacctattttcacaccttccccggcgtcatccagttgagtttgaccttatttctcatcgcttttgggttctctcaattattttatggttctttgtctgattgttatggccgaaaacctttgctattgattgggctcgttattgtcatgataggattcctcatcgctgttttcgccaggcatctttctttgttgctgatagctcgagtggttcagggtttaggagcgggttcggtttcggtattagcccgcgcggttatccgcgatcgatttgaaggggaaaaattagtccaagcactttccctcttaattatggcggcttccctggctccaatgattgcaccttttatcggcggccatattcaacaccggctgggttggcattcgatttttatttttttattcttttattcaggtttaattttattaggcatcttctttttgcttccggaaacaaaaaagaccgaatcggttccttttaaaatgggcgctttgctcaacaattataagttactgcttagacaccctatttatatcaaatacgttgtgtgtattattatggcctacgcttgtcaaattctttatttgtcaatttctccttttatttttcaaaacggattaaagctgaatgctgctcaatacagtactattattacgctgccggccatcgggtattttgtgggaaactttctttctacacgattgataaggttttttgacagcaaccatttggtatttgtaggcgcattaattgtggtgatggcgggaatagcactggctttagaagctgcttttaatggcttatccgctttttctgtcattactcccattatattctgcgtcattggcatcggcttaatatatcccaatgttattagcggctcactttctccttttccgcaaatggcaggcacagcggccgctttgtcaggcgccatacaaatggcaggtacaagcagtatagcgggcgttaccaatgcgttacacgtcgtcagcgttttggggctcgggatttcatttttactttgcggcgcagttgttctgttgatgatatttcgtattatgaggacgtccgttcaatga

SEQ ID NO: 712 - DNA, 444 bp, Coxiella burnetii
atggcggtatcgaaagcgatgaaaacgaaaacaactgatcttggtttttcgccctataaattaacgcggggcgaggaatatatgaacgaaaaacagcaggaacatttccggaaaattttgtctgaatggaaaaagcagctgatggaagaggtcgactctacggttgtccatttgaaagaagaagccagcgtgtatgcagatccgttggatcgggccagccaagaagaaggatttaatttagaactccgcacccgcgatcgtgaacgaaagctgattaaaaaaattgagcaagcagcagacgcgcttgataacggtgattatggtttctgtgaagattgcggagccgaaatcggcattcgtcgattagaagcgcgccccacagctaccaaatgtattgattgtaaaacttttgaagagattcgcgaaaaacaatccggtggataa

SEQ ID NO: 713 - DNA, 639 bp, Coxiella burnetii
atgtcttttttagctattaatgtcatgaaaaaaattctaattttgctattattgatttctcttctttttttggacggttgtcattcaaaatcgcccccgcaaaacctacaaaatgtgtgcgaaatttttcagcaatatcccgaatggttttgggcagctaaaacaacgcgtcatcgttttggaattcctatcagcgtgcaaatggccattatctaccaagagtctcatttcaattctcatgccgaaccaccgcgccaacgattattgggttttatcccttggtttcgaccaacgagcgcctcgggttatgcgcaagctgtcgatgggacatggcggcgctatttaaaagcgataggcaaattgagcggtaatcgtaatgattttagtgacgctatttattttatcggttggtatgccaatttggcccacataaagttaggcatttcaaaaaccgacgccttctctatttatttagcctatcacgaaggcattaaaggctttcgaaaaaaaacctatcgacataataaaaaattactgactctagcctcccatcaagtggcaaaacaagcacaccattatcggattcaactattgcgttgcgaacccagtctgccacaaaaaccatggtggaaattttaa

SEQ ID NO: 714 - DNA, 2676 bp, Vaccinia virus
atgatgcctattaagtcaatagttactcttgatcaattagaggactctgaatatttatttcgtatagtttctaccgttcttccgcatctatgtctagattacaaagtatgtgaccaacttaaaacaaccttcgttcatccgttcgatatattgcttaataactcattaggatccgtaactaaacaagatgagcttcaggctgctatatccaaattgggcattaattatttaattgataccacgtcacgtgaattaaaactgtttaatgttacacttaacgctggaaatatagatattattaataccccaattaacattagttcggaaactaatcctatcattaatactcacagcttttacgatcttccacctttcactcaacaccttcttaatattagattgacggatacagaatacagagctagatttatcggtggttatattaaaccagatggctccgactcaatggatgttctagcagaaaagaaatatccagatcttaactttgataacacttatttgtttaacatcctctataaggatgttattaatgcaccaataaaagaattcaaggcaaaaattgttaacggtgtattaagcagacaagattttgataatcttataggtgttagacaatatataacaatacaagatcgaccccgctttgacgacgcttataacatcgcagatgctgctagacattatggagttaatcttaatacattgccattaccaaacgtcgatctcactactatgccaacatataaacatctcatcatgtttgaacagtacttcatttatacatatgacagagtggatatttattacaatggtaacaaaatgctcttcgatgatgagattataaactttactatttctatgcgatatcaatctcttattcctagactggtagatttctttccagatataccagtaaacaataacatcgtacttcatactcgcgatcctcaaaatgctgcagtgaatgtaaccgtggcgcttccaaacgtgcaatttgtggacataaatagaaacaacaaattctttattaatttctttaacctgttggcgaaggaacaaagatctacggctatcaaagttaccaaatccatgttttgggacggtatggattacgaggaatacaagtctaaaaaccttcaggacatgatgtttataaattctacctgttatgtattcggtctttataatcacaataatactacttattgctctatcctttctgatattatctccgcagagaaaacacctattagagtatgtttgttacccagagtagtcggaggtaagactgttactaatcttatttcagaaactttgaagagtatttcatctatgactatacgagagtttcccaggaaagataaatctatcatgcatataggactttctgagacgggattcatgagattcttccaactactcaggctcatggctgataaacctcatgaaacggctattaaagaggttgttatggcttatgtgggtataaagttgggtgacaaaggtagtccgtactatattagaaaggagtcataccaagactttatctatctgctattcgcatcaatgggctttaaggtgactactagaagatccattatgggaagcaataatatctctatcatcagtattagaccaagagtaactaaacaatacatcgtcgctacattgatgaaaactagttgtagtaaaaacgaggcagaaaaattgattacttcagcgtttgatcttctcaatttcatggtatcagttagtgactttagagattatcagagttacagacagtatagaaactattgtcctagatatttctatgcaggatctcccgaaggagaggaaaccattatctgtgactcggaaccgataagtatcttggatagaattgatactcgtggtatcttttctgcgtatactattaatgaaatgatggacactgatatcttttctccagagaataaggcatttaagaataatctgagtagatttatcgagagtggagatattacaggagaagatattttctgcgcaatgccatacaacatcttagataggattattacaaatgctggtacgtgtaccgtatccataggtgatatgttggataacattacaacccagtcagactgtaatatgactaacgaaatcacagatatgataaacgcctcattgaagaatacaatttctaaagataataatatgctagtcagccaagcgttgaactctgtagctaatcgttctaaacaaaagattggagacttgaggcaatcatcgtgtaagatggcattgttgtttaaaaatcttgctacatccatctacacaatagaacgtattttcaatgctaaagtaggcgatgatgttaaggcatcgatgttggagaagtataaagtattcacagatatttccatgtcattgtataaagacttgatagctatggagaatctcaaagcgatgctatacattattcgacgaagcggatgcagaatagacgatgcacaaattactactgacgatctagtcaagtcttactcattgatccgtcctaaaattctaagtatgataaactattataatgaaatgagtagaggatactttgaacacatgaaaaaaaatctaaatatgacagatggtgactctgtctcttttgatgatgaataa

SEQ ID NO: 715 - DNA, 957 bp, Vaccinia virus
atgacgaccgtaccagtgacggatatacaaaacgatttaattacagagttttcagaagataattatccatctaacaaaaattatgaaataactcttcgtcaaatgtctattctaactcacgttaacaacgtggtagatagagaacataatgccgccgtagtgtcatctccagaggaaatatcctcacaacttaatgaagatctatttccagatgatgattcaccggccactattatcgaacgagtacaacctcatactactattattgacgatactccacctcctacttttcgtagagagttattgatatcggaacaacgtcaacaacgagaaaaaagatttaatattacagtatcgaaaaatgctgaagcaataatggaatctagatctatgataacttctatgccaacacaaacaccatccttgggagtagtttatgataaagataaaagaattcagatgttggaggatgaagtggttaatcttagaaatcaacgatctaatacaaaatcatctgataatttagataattttaccaaaatactatttggtaagactccgtataaatcaacagaagttaataagcgtatagccatcgttaattatgcaaatttgaacgggtctcccttatcagtcgaggacttggatgtttgttcagaggatgaaatagatagaatctataaaacgattaaacaatatcacgaaagtagaaaacaaaaaattatcgtcactaacgtgattattattgtcataaacattatcgagcaagcattgctaaaactcggatttgaagaaatcaaaggactgagtaccgatatcacttcagaaattatcgatgtggagatcggagatgactgcgatgctgtagcatcaaaactaggaatcggtaacagtccggttcttaatattgtattgtttatactcaagatattcgttaaacgaattaaaattatttaa

SEQ ID NO: 716 - DNA, 213 bp, Vaccinia virus
atgattggtattcttttgttgatcggtatttgtgtagcagttaccgtcgccatcctatactcgatgtataataagatcaagaactcacaaaatccgaatccaagtccgaatttaaattcgcctcctccagaaccaaaaaataccaagtttgtaaataatctggaaaaggatcatattagttcattgtataatctagttaaatcttctgtataa

SEQ ID NO: 717 - DNA, 612 bp, Vaccinia virus
atgagttatttaagatattacaatatgcttgacgacttctctgcgggtgctggagtgcttgataaagatttatttacagaggaacagcagcaatcgtttatgcctaaagatggaggtatgatgcaaaacgattatggaggaatgaatgattatttgggaatcttcaaaaataatgatgttagaacgttactcggtttgattttgttcgtcttggctctatatagccctcctctaatctctatattgatgatatttatctcatcttttctattgcctcttactagcttagttattacctattgcttagtaactcaaatgtatcgtggaggtaatggcaacactgtgggaatgtctattgtgtgtattgtagctgctgtaattattatggcaatcaatgtatttacgaattcacagatatttaatattatttcttacattattttgtttattctgttctttgcatatgtgatgaacatcgaaagacaggactatagaagaagtataaatgtaaccattcctgaacagtatacctgcaacaaaccttatactgcgggaaataaggtagatgttgatataccaacatttaacagtttaaatactgacgattattaa

SEQ ID NO: 718 - DNA, 333 bp, Vaccinia virus
atggacggaactcttttccccggagatgacgatcttgcaattccagcaactgaatttttttctacaaaggctgctaaaaagccagaggctaaacgcgaagcaattgttaaagccgatgaagacgacaatgaggaaactctcaaacaacggctaactaatttggaaaaaaagattactaatgtaacaacaaagtttgaacaaatagaaaagtgttgtaaacgcaacgatgaagttctatttaggttggaaaatcacgctgaaactctaagagcggctatgatatctctggctaaaaagattgatgttcagactggacggcgcccatatgagtaa

SEQ ID NO: 719 - DNA, 558 bp, Vaccinia virus
atgatgacaccagaaaacgacgaagagcagacatctgtgttctccgctactgtttacggagacaaaattcaaggaaagaataaacgcaaacgcgtgattggtctatgtattagaatatctatggttatttcactactatctatgattaccatgtccgcgtttctcatagtgcgcctaaatcaatgcatgtctgctaacgaggctgctattactgacgccgctgttgccgttgctgctgcatcatctactcatagaaaggttgcgtctagcactacacaatatgatcacaaagaaagctgtaatggtttatattaccagggttcttgttatatattacattcagactaccagttattctcggatgctaaagcaaattgcactgcggaatcatcaacactacccaataaatccgatgtcttgattacctggctcattgattatgttgaggatacatggggatctgatggtaatccaattacaaaaactacatccgattatcaagattctgatgtatcacaagaagttagaaagtatttttgtgttaaaacaatgaactaa

SEQ ID NO: 720 - DNA, 1935 bp, Vaccinia virus
atggaagccgtggtcaatagcgatgtttttttaacatctaacgcaggactaaaatctagttatactaatcaaactctttctttggtagatgaagatcatattcacacttctgataaatctttgtcttgtagtgtatgcaattcattgtcccaaattgtagacgatgactttatatccgcaggggctagaaatcaacgtaccaaacctaaacgtgcaggaaataatcaatctcaacagcctatcaaaaaggattgtatggtttccatcgacgaagtagcatctacacatgattggagtacgagattgagaaatgatgggaatgcaattgctaaatatctaactactaacaagtatgacacatctaactttactattcaggatatgcttaacattatgaataaactaaatattgtcagaacaaatagaaacgagctatttcaactccttacccatgtaaagagcacattgaacaatgctagtgtttctgtgaaatgtactcatcctttagtacttattcattctcgagctagtcctagaatcggtgaccaactcaaagagttagataaaatatactctccatctaatcatcatattcttctgtcgactacacgattccaatccatgcattttaccgatatgtctagttcacaagatttgtcttttatttatagaaaaccagaaactaattactatattcatcctattctgatggcactattcggtattaaacttcctgcgctcgagaacgcgtatgtacatggagacacctatagcctaatccagcaactttatgaatttagaaaagtaaagtcttataattatatgttgttggttaatcgtcttacggaggataatccgatagtgattacaggtgtatcagatctaatttccacagagattcagagagcaaacatgcataccatgattagaaaagcaattatgaacattagaatgggaattttttattgtaacgatgatgatgcggtagatccccatctaatgaagattattcatactggatgctctcaagttatgacagatgaggaacagatattggcttctattttgtctatagttggatttagacctacgttggtttctgtggctagacctataaacggcatcagttacgatatgaaacttcaggcggcaccatacatagttgttaatcctatgaagatgatcacaacatccgacagtccgatttctatcaattccaaggatatttattctatggcattcgatggcaatagtggaagagtggtgttcgctcctcctaacataggatatggaagatgttctggagttacacacattgatccattgggaactaatgtgatgggtagtgctgttcattcccctgttatcgttaatggagcaatgatgttttatgtagaacgacgtcagaataagaatatgtttggtggagaatgttacaccggctttagatctctaatagatgatactccgattgacgtatcaccagaaatcatgctaaacggtatcatgtataggttaaagtccgcagtttgttacaaactcggagaccaattctttgattgtggatcgtctgatatcttcttgaagggacattatacgattctatttacagaaaatggaccctggatgtacgatcctctttctgttttcaatccgggagctagaaatgctagattgatgcgagctctcaaaaaccagtacaagaaattatcaatggattcagacgatggtttttatgaatggttgaatggcgacggttcagtatttgctgcctcaaaacagcaaatgttgatgaatcacgttgctaactttgacgacgatcttctaactatggaagaagccatgtcgatgatttcgagacattgttgtatcttaatttatgcacaggattatgatcaatatattagcgctagacatattacagaactattttag

SEQ ID NO: 721 - DNA, 660 bp, Vaccinia virus
atgtactcgttagtatttgttattttgatgtgtataccatttagttttcaaacagtgtatgatgataaatcggtatgcgattctgacaataaagaatatatgggaatagaagtttatgtagaagcaacgctagacgaacccctcagacaaacaacgtgtgaatccaaaatccataaatatggtgcatctgtatcaaacggaggattaaatatttctgttgatctattaaactgttttcttaattttcatacagttggtgtatacactaatcgcgataccgtatacgcgaagtttgctagtttggatccatggactacggaacctataaattctatgacccatgacgatctagtaaaattaacagaagaatgtatagtggacatttatttaaaatgtgaagtggataaaacaaaggatttcatgaaaactaacggtaatagattaaaaccaagagactttaaaactgttcctccttctaatgtaggaagcatgatagaactacagtctgactattgcgtaaacgatgtgactacatacgtcaaaatatacgatgagtgtggaaacattaaacagcattccattccaacactaagagattattttaccaccaagaatggtcaaccacgtaaaatattaaagaaaaaatttgataattgttaa

SEQ ID NO: 722 - DNA, 759 bp, Vaccinia virus
atgggtaacaaaaatattaaaccatctaaggaaaatagactgtccatcttgtccaaggataagatggattcatttaagagaggatcttgggcaacgtcatcctttagagaaaagtcgcgtgcaaccatccaaagattttcatctcttagacgagaacatattaaagtagaccatcctgacaagttcctggagttaaagagagggatatataaaataattcagaaatcgtcgtctatagatgtggacaaacggactaagctcatgtccaacataaaaacgatgatgataaatccattcatgatcgagggtttaatgacatctttagaaaacttggatcccgataacaagatgagctactcatcggtgatgatattgggagaattcgacatcatcaatataagcgacaatgaggcggcattcgagttcataaacagtctgttgaaatctcttctcttgttaaatactagacaactaaaactcttggaatactccattagtaatgacttgttgtatgcccacataaatgcgttggagtatatcataaaaaatacatttaatgttccagaacggcaactgattctgagaggtcaatacctaactccaattttcagtgatttgttaaagtatgcgggtctaaccataaagtcaaacatactcatgtggaataaacagtttatcaaaccagtatctgacctctatacatctatgagactccttcattgtgttacagaatcatataaggtgattggaatgggataa

SEQ ID NO: 723 - DNA, 846 bp, Vaccinia virus
atggacttctttaacaagttctcacaggggctggcagaatcctctacaccaaagtcgtcaatctattattctgaagaaaaggatccggatacgaaaaaggatgaagcgattgaaataggactaaagtctcaagagtcgtattatcaaagacagttgcgagaacaactagctagagataatatgacggtcgccagcagacagcctatccaaccgctacaaccaactattcatataactccacagccggttccaacagctacaccggctcctattcttctacctagtagtactgttcctacaccaaaaccacgacaacaaactaatacatcatctgatatgtctaatctttttgattggctgtctgaagatactgatgcgccggcgagttcactccttccagcgttgacgccgagcaatgctgttcaggatattatctctaaatttaataaagatcaaaagacgacgacaccgccatctacccaaccttctcagacgttaccaacaactacatgtacacaacaatcggatggaaatatttcttgtactactccaacggttacacctcctcaacctcctattgtggccactgtatgtactcctacacctactggtggtacagtatgtacaacagcacaacaaaatccaaatccaggagcagcatctcaacaaaatctagacgatatggcccttaaggatctcatgtcgaatgttgaaagagatatgcaccaacttcaggccgaaacaaacgatctggtgacgaacgtatatgatgcaagggagtatacgcgtagggcaatagatcaaattctacaactagtcaaaggttttgaacgattccaaaagtaa

SEQ ID NO: 724 - DNA, 945 bp, Vaccinia virus
atgacacgattaccaatacttttgttactaatatcattagtatacgctacaccttttcctcagacatctaaaaaaataggtgatgatgcaactctatcatgtaatcgaaataatacaaatgactacgttgttatgagtgcttggtataaggagcccaattccattattcttttagctgctaaaagcgacgtcttgtattttgataattataccaaggataaaatatcttacgactctccatacgatgatctagttacaactatcacaattaaatcattgactgctagagatgccggtacttatgtatgtgcattctttatgacatcaactacaaatgacactgataaagtagattatgaagaatactccacagagttgattgtaaatacagatagtgaatcgactatagacataatactatctggatctacacattcaccggaaactagttctaagaaacctgattatatagataattctaattgctcgtcggtattcgaaatcgcgactccggaaccaattactgataatgtagaagatcatacagacaccgtcacatacactagtgatagcattaatacagtaagtgcatcatctggagaatccacaacagacgagactccggaaccaattactgataaagaagatcatacagttacagacactgtctcatacactacagtaagtacatcatctggaattgtcactactaaatcaaccaccgatgatgcggatctttatgatacgtacaatgataatgatacagtaccaccaactactgtaggcggtagtacaacctctattagcaattataaaaccaaggactttgtagaaatatttggtattaccgcattaattatattgtcggccgtggcaattttctgtattacatattatatatataataaacgttcacgtaaatacaaaacagagaacaaagtctag

SEQ ID NO: 725 - DNA, 660 bp, Vaccinia virus
atggcgatgttttacgcacacgctctcggtgggtacgacgagaatcttcatgcctttcctggaatatcatcgactgttgccaatgatgtcaggaaatattctgttgtgtcagtttataataacaagtatgacattgtaaaagacaaatatatgtggtgttacagtcaggtgaacaagagatatattggagcactgctgcctatgtttgagtgcaatgaatatctacaaattggagatccgatccatgatcaagaaggaaatcaaatctctatcatcacatatcgccacaaaaactactatgctctaagcggaatcgggtacgagagtctagacttgtgtttggaaggagtagggattcatcatcacgtacttgaaacaggaaacgctgtatatggaaaagttcaacatgattattctactatcaaagagaaggccaaagaaatgaatgcacttagtccaggacctatcattgattaccacgtctggataggagattgtatctgtcaagttactgctgtggacgtacatggaaaggaaattatgagaatgagattcaaaaagggtgcggtgcttccgatcccaaatctggtaaaagttaaacttggggagaatgatacagaaaatctttcttctactatatcggcggcaccatcgaggtaa

SEQ ID NO: 726 - DNA, 954 bp, Vaccinia virus
atgaaaacgatttccgttgttacgttgttatgcgtactacctgctgttgtttattcaacatgtactgtacccactatgaataacgctaaattaacgtctaccgaaacatcgtttaatgataaacagaaagttacgtttacatgtgatcagggatatcattcttcggatccaaatgctgtctgcgaaacagataaatggaaatacgaaaatccatgcaaaaaaatgtgcacagtttctgattacatctctgaattatataataaaccgctatacgaagtgaattccaccatgacactaagttgcaacggcgaaacaaaatattttcgttgcgaagaaaaaaatggaaatacttcttggaatgatactgttacgtgtcctaatgcggaatgtcaacctcttcaattagaacacggatcgtgtcaaccagttaaagaaaaatactcatttggggaatatatgactatcaactgtgatgttggatatgaggttattggtgcttcgtacataagttgtacagctaattcttggaatgttattccatcatgtcaacaaaaatgtgatatgccgtctctatctaatggattaatttccggatctacattttctatcggtggcgttatacatcttagttgtaaaagtggttttacactaacggggtctccatcatccacatgtatcgacggtaaatggaatcccgtactcccaatatgtgtacgaactaacgaagaatttgatccagtggatgatggtcccgacgatgagacagatttgagcaaactctcgaaagacgttgtacaatatgaacaagaaatagaatcgttagaagcaacttatcatataatcatagtggcgttaacaattatgggcgtcatatttttaatctccgttatagtattagtttgttcctgtgacaaaaataatgaccaatataagttccataaattgctaccgtaa

SEQ ID NO: 727 - DNA, 747 bp, Vaccinia virus
atgaacttttacagatctagtataattagtcagattattaagtataatagacgactagctaagtctattatttgcgaggatgactctcaaattattacactcacggcattcgttaaccaatgcctatggtgtcataaacgagtatccgtgtccgctattttattaactactgataacaaaatattagtatgtaacagacgagatagttttctctattctgaaataattagaactagaaacatgtttagaaagaaacgattatttctgaattattccaattatttgaacaaacaggaaagaagtatactatcgtcatttttttctctagatccagctactgctgataatgatagaatagacgctatttatccgggtggcatacccaaaaggggtgagaatgttccagagtgtttatccagggaaattaaagaagaagttaatatagacaattcttttgtattcatagacactcggttttttattcatggcatcatagaagataccattattaataaattttttgaggtaatcttctttgtcggaagaatatctctaacgagtgatcaaatcattgatacatttaaaagtaatcatgaaatcaaggatctaatatttttagatccgaattcaggtaatggactccaatacgaaattgcaaaatatgctctagatactgcaaaactcaaatgttatggccatagaggatgttattacgaatcattaaaaaaattaactgaggatgattga

SEQ ID NO: 728 - DNA, 1896 bp, Vaccinia virus
atgagtaaatcacacgcggcctatatcgattatgcattgcgcagaactactaatatgcctgttgaaatgatggggtcggacgtagtacgcctcaaggattatcaacattttgtagcaagagttttcttaggattagacagtatgcattctcttttattgttccatgaaacgggtgtcggtaaaacaatgactactgtatatattctcaaacatcttaaggatatttatacgaattgggctattatcttattggtgaaaaaggctttgatagaagatccttggatgaacactatactcagatacgctccagagataacgaaggattgtatttttattaattacgatgatcaaaattttagaaataaattttttactaatatcaaaactattaattccaagagtagaatatgcgtcattattgatgaatgtcataacttcatttctaaatcattaatcaaagaagatggtaagatccgtcctactcgttcagtatataattttttatctaagaccatcgcattaaaaaaccataagatgatttgtttatcggctacacctatcgtcaatagtgtgcaagaattcaccatgttggttaacttactacgaccaggatccttacaacaccaatcgctatttgagaataaacgtctagttgatgaaaaagaattagtctccaaactaggaggcctatgttcgtacatagttaataacgagttttctatttttgatgacgtagaagggtctgcatcattcgctaagaaaacagtattaatgcgatacgttaatatgtcgaaaaagcaagaagaaatttatcaaaaggctaaactcgctgaaataaaaacaggtatatcatcatttagaattctgagacgtatggctactacgtttacgttcgatagctttcctgaaagacaaaatcgtgatccgggcgaatacgcgcaagagatagcaacactatataatgattttaaaaattcattaagagatagagaattttctaaatctgcattagatacctttaaaaggggagaactattgggaggggatgctagtgcggctgatatctctctatttactgaattaaaagagaaaagcgtcaaatttatagatgtatgtttgggaatattagcatcccatggtaaatgtctagtctttgaaccatttgttaatcagtcaggaatagaaatcttattactatatttcaaagtctttggtatctctaatatagagttctcatctagaacaaaagatactagaatcaaggcggtggctgagtttaaccaagaatcaaacactaacggagaatgcattaaaacatgcgtattctcttctagtggaggcgagggtattagcttcttctcaatcaatgatatcttcattttagatatgacatggaacgaggcgtctcttcgtcagatagtaggaagagccattcgtctcaatagtcacgttcttactcctccagaacgtagatatgtaaacgtgcactttataatggctagattatctaatggtatgcctactgtagacgaagacctatttgaaatcattcaaagcaaatcaaaagaatttgtccaattgtttagagtgtttaaacatacatcattagaatggattcatgctaatgaaaaagacttctcaccgatcgacaatgagtccggttggaaaaccttggtttcaagagccatcgatctatcgtctaacaaaaatattaccaataaactaattgagggtactaatatttggtattccaattctaatagattaatgtcaataaatagaggatttaaaggcgtagatggtcgagtatacgatgtagacggtaactatctacatgatatgccggacaatcccgttataaaaatacacgatggtaaattaatttatattttctaa

SEQ ID NO: 729 - DNA, 1656 bp, Vaccinia virus
atgaataatactatcattaattctttgatcggtggggatgactctattaaacggtctaatgtcttcgcagtcgatagtcaaattccaactttatatatgccgcaatatatttctctatccggagttatgacaaacgatggtccagacaatcaggctatcgctagcttcgaaattagggatcagtatattactgcgcttaatcatttggttctgagtttggaacttccagaagttaaaggtatgggaagattcggttacgtaccatatgttggatataaatgtattaatcacgtatctatctcttcgtgtaacggtgttatttgggaaattgagggcgaagaattatataataattgtatcaataatacaattgctttgaaacactctggatattctagtgaacttaatgatatttctattggcctaactcctaatgacactattaaagaaccatctacagtatacgtttatattaaaactccgtttgatgtggaagatacattcagcagtcttaaactatccgattcaaaaattaccgtaacggtaaccttcaatccagtatccgatatcgttattcgtgactcttcgttcgactttgaaacgttcaacaaagaatttgtttatgttcctgaattgagctttattggatatatggttaagaatgtacaaattaaaccatcatttatagagaaacctaggagagtaataggtcaaataaaccaaccaacggcgactgtaactgaagttcatgcggcaacatcgctctctgtttatactaaaccttattatggaaatacggataataaatttatttcgtatccagggtactcacaagatgaaaaagattatatagatgcatatgtgagtagattgttggatgatctagttattgttagcgatggtccaccgactggttatccggagtctgccgagatcgtagaggttccagaagatggtatcgtttctattcaagatgctgatgtgtatgtaaaaattgataatgttcctgataatatgagtgtttatcttcatactaatctgctaatgtttggaacacgaaaaaattcttttatatataacatttctaaaaagttttccgccattactggaacatatagtgatgccactaagagaacaatctttgctcacatatcacatagtatcaacatcatcgatacatctattcctgtaagtctttggactagtcaacgtaacgtctataacggagataatagatcagccgaatcaaaggccaaggatttgttcattaacgatcccttcatcaagggaatagattttaagaataagaccgatattatttctagactagaagttagatttggaaatgatgttctatattcagagaacggacccatctcgagaatttataatgaactactgacaaaaagcaataatggaacaagaaccctaacttttaactttacaccaaagatattctttaggccgacaactattacggctaatgtatctagggggaaagataaactatctgttcgagtagtttattccaccatggatgtcaaccatccaatctattatgtacaaaaacaattggtagttgtatgtaatgacctgtataaggtatcttacgatcaaggggtaagtattaccaagattatgggagataataactaa

SEQ ID NO: 730 - DNA, 915 bp, Vaccinia virus
atgccgcaacaactatctcctattaatatagaaactaaaaaagcaatttctaacgcgcgattgaagccgttagacatacattataatgagtcgaaaccaaccactatccagaacactggaaaactagtaaggattaattttaaaggaggatatataagtggagggtttctccccaatgaatatgtgttatcatcactacatatatattggggaaaggaagacgattatggatccaatcacttgatagatgtgtacaaatactctggagagattaatcttgttcattggaataagaaaaaatatagttcttatgaagaggcaaaaaaacacgatgatggacttatcattatttctatattcttacaagtattggatcataaaaatgtatattttcaaaagatagttaatcaattggattccattagatccgccaatacgtctgcaccgtttgattcagtattttatctagacaatttgctgcctagtaagttggattattttacatatctaggaacaactatcaaccactctgcagacgctgtatggataatttttccaacgccaataaacattcattctgatcaactatctaaattcagaacactattgtcgtcgtctaatcatgatggaaaaccgcattatataacagagaactatagaaatccgtataaattgaacgacgacacgcaagtatattattctggggagattatacgagcagcaactacctctccagcgcgcgagaactattttatgagatggttgtccgatttgagagagacatgtttttcatattatcaaaaatatatcgaagagaataaaacattcgcaattattgccatagtattcgtgtttatacttaccgctattctcttttttatgagtcgacgatattcgcgagaaaaacaaaactag

SEQ ID NO: 731 - DNA, 1440 bp, Vaccinia virus
atgaataggaatcctgatcagaatactcttcctaatattacattaaagattatagaaacctatttaggcagagtacctagtgtgaacgaatatcatatgttaaaattacaagctagaaatattcaaaaaataactgtttttaacaaagacatatttgtatctttagtaaaaaagaataaaaaaagatttttttccgatgttaatacatctgcatcagaaataaaagatcgtatacttagctacttttctaaacagactcaaacatataatataggtaaattatttacgattatagaactacaatctgtattagtgaccacatacacggacatattaggagttcttactattaaagctccaaatgtaatttcatctaaaatttcttataatgtaacatcaatggaagaattggcaagagatatgctaaattctatgaacgtcgcagtaatagacaaggcaaaagtaatgggacgtcataatgtatcttccctagtcaaaaatgttaataagttgatggaagaatatcttagacgccataataaaagttgtatatgttacggatcatattctctatatctaattaatccaaatatacggtacggcgatatagatattcttcagactaattctagaacttttcttatagatttggcctttctaataaaatttatcacgggaaataatattatattaagtaaaatcccatatcttagaaactatatggtgataaaagatgaaaacgataatcatatcattgatagttttaatattcgccaggataccatgaacgtagttcctaaaatctttatagataatatctatatagtggatccgacgtttcaactattgaacatgataaaaatgttttctcaaatagatagattggaagatctatccaaagatcctgaaaagtttaatgcgcgtatggcaaccatgctagaatacgttagatatacacatggtatagtctttgatggtaagcgtaataatatgccgatgaaatgtatcatcgatgaaaataatcgcatagttactgtcactactaaagactattttagctttaaaaaatgtctagtgtatctagatgaaaatgtgttatcgagtgatatattagatcttaacgccgacacatcgtgtgatttcgagagtgttacaaattctgtatatctaattcatgataatatcatgtatacatatttctcaaatactattctccttagtgataaggggaaggtacatgaaataagtgccagaggtttatgtgcacatatattgttgtatcagatgctgacatctggagaatacaaacaatgtttatcggatctcttaaattcgatgatgaatagagataaaatacctatctattcacatactgaaagagataaaaaacctggacgacacggatttattaatatcgaaaaggatataattgtattttag

SEQ ID NO: 732 - DNA, 573 bp, Vaccinia virus
atgtctaaaatctatatcgacgagcgttctaacgcagagattgtgtgtgaggctattaaaaccattggaatcgaaggagctactgctgcacaactaactagacaacttaatatggagaagcgagaagttaataaagctctgtacgatcttcaacgtagtgctatggtgtacagctccgacgatattcctcctcgttggtttatgacaacggaggcggataagccggatgctgatgctatggctgacgtcataatagatgatgtatcccgcgaaaaatcaatgagagaggatcataagtcttttgatgatgttattccggctaaaaaaattattgattggaaaggtgctaaccctgtcaccgttattaatgagtactgccaaattactaggagagattggtcttttcgtattgaatcagtggggcctagtaactctcctacattttatgcctgtgtagacatcgacggaagagtattcgataaggcagatggaaaatctaaacgagatgctaaaaataatgcagctaaattggcagtagataaacttcttggttacgtcatcattagattctga

SEQ ID NO: 733 - DNA, 1119 bp, Vaccinia virus
atgtggccatttgcatcggtacctgcgggagcaaaatgtaggctggtagaaacactaccagaaaatatggattttagatccgatcatttaacaacatttgaatgttttaacgaaattatcactctagctaagaaatatatatacatagcatctttttgttgtaatcctctgagtacgactaggggagcgcttatttttgataaactaaaagaggcatctgaaaaagggattaaaataatagttttgctagatgaacgagggaaaagaaatctgggagagctacaaagtcactgcccggatataaattttataaccgttaatatagataaaaaaaataatgtgggactactactcggttgtttttgggtgtcagatgatgaaagatgttatgtaggaaacgcgtcatttactggaggatctatacatacgattaaaacgttaggtgtatattctgattatcccccgctggccacagatcttcgtagaagatttgatacttttaaagcctttaatagcgcaaaaaattcatggttgaatttatgctctgcggcttgttgtttgccagttagcactgcgtatcatattaagaatcctataggtggagtgttctttactgattctccggaacacctattgggatattctagagatctagataccgatgtagttattgataaactcaagtcggctaagactagtatagatattgaacatttggccatagttcccactacacgtgtcgacggtaatagctactattggcccgacatttacaactccattatagaagcagccattaatagaggagttaagatcagacttctagttggtaattgggataagaacgacgtatattctatggcaaccgccagaagtctagacgcgttgtgtgttcaaaatgatctatctgtgaaggttttcactattcagaataatacaaaattgttgatagtcgacgacgaatatgttcatatcacttcggcaaatttcgacggaacccattaccaaaatcacggattcgtcagttttaatagtatagataaacagcttgtaagcgaggctaaaaaaatatttgagagagattgggtatctagccacagtaaatcgttaaaaatttaa

SEQ ID NO: 734 - DNA, 444 bp, Vaccinia virus
atgttcaacatgaatattaactcaccagttagatttgttaaggaaactaacagagctaaatctcctactaggcaatcaccttacgccgccggatatgatttatatagcgcttacgattatactatccctccaggagaacgacagttaattaagacagatattagtatgtccatgcctaagttctgctatggtagaatagctcctaggtctggtctgtccctaaaaggcattgatataggaggcggtgtaatagacgaagattataggggaaacataggagtcattcttattaataatggaaaatgtacgtttaatgtaaatactggagatagaatagctcagctaatctatcaacgtatatattatccagaactggaagaagtacaatctctagatagtacaaatagaggagatcaagggtttggatcaacaggacttagataa

SEQ ID NO: 735 - DNA, 639 bp, Vaccinia virus
atggcggaaactaaagagtttaaaactttgtataatctttttatagatagttatttacaaaaattagctcaacattctatccctactaatgtcacttgtgctattcatataggagaggttataggacagtttaaaaattgcgcgctccgaataactaacaaatgcatgagtaattctcgacttagtttcacactcatggttgaatcatttattgaagtgatttcattgcttccggaaaaggatagaagagctatcgctgaagaaataggaatagatctagacgatgtacctagtgcggtatccaagctagaaaagaactgtaatgcgtatgcggaggttaataatattatagatatacagaaattagatatcggagaatgttcggctccgcccggtcaacatatgcttttacagatagttaatacaggatccgcggaagcaaattgtggtttacagacaattgttaagtccttaaataaaatatacgttccacctattatcgaaaaccgattgccgtattacgatccgtggtttctagtgggtgtagcaattattctagttatttttactgtagctatttgttctattagacgaaatctggctcttaaatacagatacggaacgtttttatacgtttaa

SEQ ID NO: 736 - DNA, 1305 bp, Vaccinia virus
atgggtatcaaaaacttaaaatcgttactgctggaaaataaatcactgacgatattagatgataatttatacaaagtatacaatggaatatttgtggatacaatgagtatttatatagccgtcgccaattgtgtcagaaacttagaagagttaactacggtattcataaaatacgtaaacggatgggtaaaaaagggagggcatgtaaccctttttatcgatagaggaagtataaaaattaaacaagacgttagagacaagagacgtaaatattctaaattaaccaaggacagaaaaatgctagaattagaaaagtgtacatccgaaatacaaaatgttaccggatttatggaagaagaaataaaggcagaaatgcaattaaaaatcgataaactcacatttcaaatatatttatctgattctgataacataaaaatatcattgaatgagatactaacacatttcaacaataatgagaatgttacattattttattgtgatgaacgagacgcagaattcgttatgtgtctcgaggctaaaacacatttctctaccacaggagaatggccgttgataataagtaccgatcaggatactatgctatttgcatctgctgataatcatcctaagatgataaaaaacttaactcaactgtttaaatatgttccatctgcagaggataactatttagcaaaattaacggcgttagtgaatggatgtgatttctttcctggactctatggggcatctataacacccaacaacttaaacaaaatacaattgtttagtgattttacaatcgataatatagtcactagtttggcaattaaaaattattatagaaagactaactctaccgtagacgtgcgtaatattgttacgtttataaacgattacgctaatttagacgatgtctactcgtatattcctccttgtcaatgcactgttcaagaatttatattttccgcattagatgaaaaatggaatgaatttaaatcatcttatttagaaagcgtgccgttaccctgccaattaatgtatgcgttagaaccacgcaaggagattgatgtttcagaagttaaaactttatcatcttatatagatttcgaaaatactaaatcagatatcgatgttataaaatctatatcctcgatcttcggatattctaacgaaaactgtaacacgatagtattcggcatctataaggataatttactactgagtataaatagttcattttactttaacgatagtctgttaataaccaatactaaaagtgataatataataaatataggttactag

SEQ ID NO: 737 - DNA, 1116 bp, Vaccinia virus
atggctgcagaacagcgtcgttctacaatttttgacatagtttcaaaatgtatagtgcaatctgtattaagagatatatctattaattctgaatacatagagtccaaagctaaacaattgtgctattgtccggcatcgaaaaaggaatcggtgattaatggtatctacaattgttgcgagtcaaatatagaaataatggacaaagagcagctattaaaaatattggacaatcttcgatgtcattcggctcatgtatgtaacgccacagatttctggagactatataattcgttaaaacggtttactcatactaccgcattctttaatacatgcaagcccactattctagccacgctaaacactttgataaccctgattttatctaacaagttattgtatgcggcagaaatggtagagtatctagagaaccaactagattcatcaaataaatcaatgtctcaagaactagcagaattattggaaatgaaatatgctctcattaatctggtacaatataggattttgccaatgatcatcggtgagcctattatagtagctggattttctggtaaagaaccaatttctgattattctgcagaagtggaaaggctaatggaactaccagttaaaactgatatagtgaataccacatatgacttcttagccagaaaaggtattgatactagcaacaatatagcagaatatatagccggcttgaaaatagaagagattgaaaaggtagaaaaatatttaccagaagttatatctacaattgccaatagtaatataataaaaaataaaaaatctatctttccggccaatatcaacgataaacagatcatggaatgctctagaatgttagacacgagtgagaaatactctaaaggatataaaactgatggagctgtgactagtccattgacgggaaataatacaattacaacatttataccaatttctgcgtccgatatgcaaaagtttaccattttagaatatctttacattatgagagtgatggcaaacaacgttaagaaaaagaacgagggaaaaaacaacggaggagtagttatgcatattaactcaccctttaaggtaatcaatttgccaaaatgttaa

SEQ ID NO: 738 - DNA, 975 bp, Vaccinia virus
atggcggcggcgaaaactcctgttattgttgtgccagttattgatagacttccatcagaaacatttcctaatgttcatgagcatattaatgatcagaagttcgatgatgtaaaggacaacgaagttatgccagaaaaaagaaatgttgtggtagtcaaggatgatccagatcattacaaggattatgcgtttatacagtggactggaggaaacattagaaatgatgacaagtatactcacttcttttcagggttttgtaacactatgtgtacagaggaaacgaaaagaaatatcgctagacatttagccctatgggattctaatttttttaccgagttagaaaataaaaaggtagaatatgtagttattgtagaaaacgataacgttattgaggatattacgtttcttcgtcccgtcttgaaggcaatgcatgacaaaaaaatagatatcctacagatgagagaaattattacaggcaataaagttaaaaccgagcttgtaatggacaaaaatcatgccatattcacatatacaggagggtatgatgttagcttatcagcctatattattagagttactacggcgctgaacatcgtagatgaaattataaagtctggaggtctatcatcgggattttattttgaaatagccagaattgaaaacgaaatgaagatcaataggcagatactggataatgccgccaaatatgtagaacacgatccccgacttgttgcagaacaccgtttcgaaaacatgaaaccgaatttttggtctagaataggaacggcagctactaaacgttatccaggagttatgtacgcgtttactactccactgatttcattttttggattgtttgatattaatgttataggtttgattgtaattttgtttattatgtttatgctcatctttaacgttaaatctaaactgttatggttccttacaggaacattcgttaccgcatttatctaa

SEQ ID NO: 739 - DNA, 612 bp, Vaccinia virus
atggcgtggtcaattacaaataaagcggatactagtagcttcacaaagatggctgaaatcagagctcatctaaaaaatagcgctgaaaataaagataaaaacgaggatattttcccggaagatgtaataattccatctactaagcccaaaaccaaacgagccactactcctcgtaaaccagcggctactaaaagatcaaccaaaaaggaggaagtggaagaagaagtagttatagaggaatatcatcaaacaactgaaaaaaattctccatctcctggagtcagcgacattgtagaaagcgtggccgctgtagagctcgatgatagcgacggggatgatgaacctatggtacaagttgaagctggtaaagtaaatcatagtgctagaagcgatctctctgacctaaaggtggctaccgacaatatcgttaaagatcttaagaaaattattactagaatctctgcagtatcgacggttctagaggatgttcaagcagctggtatctctagacaatttacttctatgactaaagctattacaacactatctgatctagtcaccgagggaaaatctaaagttgttcgtaaaaaagttaaaacttgtaagaagtaa

SEQ ID NO: 740 - DNA, 945 bp, Vaccinia virus
atgcgtgcacttttttataaagatggtaaactctttaccgataataattttttaaatcctgtatcagacgataatccagcgtatgaggttttgcaacatgttaaaattcctactcatttaacagatgtagtagtatatgaacaaacgtgggaggaggcgttaactagattaatttttgtgggaagtgattcaaaaggacgtagacaatacttttacggaaaaatgcatgtacagaatcgcaacgctaaaagagatcgtatttttgttagagtatataacgttatgaaacgaattaattgttttataaacaaaaatataaagaaatcgtccacagattccaattatcagttggcggtttttatgttaatggaaactatgttttttattagatttggtaaaatgaaatatcttaaggagaatgaaacagtagggttattaacactaaaaaataaacacatagaaataagtcccgatgaaatagttatcaagtttgtaggaaaggacaaagtttcacatgaatttgttgttcataagtctaatagactatataagccgctattgaaactgacggatgattctagtcccgaagaatttctgttcaacaaactaagtgaacgaaaggtatatgaatgtatcaaacagtttggtattagaatcaaggatctccgaacgtatggagtcaattatacgtttttatataatttttggacaaatgtaaagtccatatctcctcttccatcaccaaaaaagttaatagcgttaactatcaaacaaactgctgaagtggtaggtcatactccatcaatttcaaaaagagcttatatggcaacgactattttagaaatggtaaaggataaaaattttttagatgtagtatctaaaactacgttcgatgaattcctatctatagtcgtagatcacgttaaatcatctacggatggatga

SEQ ID NO: 741 - DNA, 441 bp, Vaccinia virus
atggaaatggataagcgtatgaaatctctcgcaatgaccgctttctttggggagctaagcacattagatattatggcattgataatgtctatatttaaacgccatccaaacaataccattttttcagtggataaggatggtcagtttatgattgatttcgaatacgataattataaggcttctcaatatttggatctgaccctcactccgatatctggagatgaatgcaagactcacgcatcgagtatagccgaacaattggcgtgtgtggatattattaaagaggatattagcgaatatatcaaaactactccccgtcttaaacgatttataaaaaaataccgcaatagatcagatactcgcatcagtcgagatacagaaaagcttaaaatagctctagctaaaggcatagattacgaatatataaaagacgcttgttaa

SEQ ID NO: 742 - DNA, 939 bp, Vaccinia virus
atggcggaatttgaagatcaactcgttttcaatagtatcagtgcccgtgcattgaaagcttatttcactgctaaaatcaatgaaatggtagatgagttggtcacaagaaaatgtccacaaaagaaaaaatcacaagctaagaaacctgaagtacgcattcctgtagatcttgtaaagtctagttttgtgaaaaagtttggattgtgcaattatggaggaatccttatcagtcttattaatagtctagtagaaaataatttctttacaaaggatggaaaactggatgatacaggcaaaaaggaattggttttgacagatgtcgaaaaacgaattcttaataccatagataaatcatctcctttgtatatcgatattagtgatgttaaagtattggctgctagactaaaaagaagcgctacacaatttaactttaatggacatacatatcatctggaaaatgataaaatagaagatctcattaatcagttggttaaggacgaatccattcaactggatgaaaagagttctattaaagatagtatgtatgtcattcccgatgaacttatcgatgttctcaaaactagattgtttagatctcctcaagtcaaggataatattatttcgcgtactagattgtatgattattttactagagttactaagagagacgaatcgtcaatctatgtgattctaaaggatcctaggatcgctagcattttgtcactagaaactgttaaaatgggcgcctttatgtatacaaaacatagtatgttgacgaacgctatttcatctagagtcgatagatattctaaaaagtttcaagaatctttttacgaagatattgcagaatttgttaaagaaaatgagagagttaatgtatcgagagtggttgaatgtttgactgtgcctaatattactatatcaagtaatgctgaataa

SEQ ID NO: 743 - DNA, 1110 bp, Vaccinia virus
atgattgcgttattgatactatcgttaacgtgttcagtgtctacctatcgtctgcaaggatttaccaatgccggtatagtagcgtataaaaatattcaagatgataatattgtcttctcaccgtttggttattcgttttctatgtttatgtcgctattgcctgcatcaggtaatactagaatagaattattgaagactatggatttgagaaaaagagatctgggtccagcatttacagaattaatatcaggattagctaagctgaaaacatctaaatatacgtacactgatctaacttatcaaagtttcgtagataatactgtgtgcattaaaccgtcgtattatcaacaatatcatagattcggcctatatagattaaactttagacgagatgcggttaataaaattaattctatagtagaacgtagatccggtatgtctaatgtagtagattctaatatgctcgacaataatactctatgggcaatcattaatactatatattttaaaggtatatggcaatatccgtttgatatcactaaaacacgcaatgctagttttactaataagtacggtacgaaaacggttcccatgatgaacgtagttactaaattgcaaggaaatacaatcacaatcgatgacgaagaatatgatatggtacgccttccgtataaggatgctaatattagtatgtacctggcaataggtgataatatgacccatttcacagattctattacggctgcaaaattagactattggtcgtttcaattagggaataaagtgtacaatcttaaactccctaaattttctatcgaaaataagagggatattaagtcgatagccgaaatgatggctcctagtatgtttaatccagataatgcgtcgtttaaacatatgactagggacccattatatatttataaaatgtttcagaatgcaaagatagatgtcgacgaacaaggaactgtagcagaggcatctactattatggtagctacggcgagatcatctcctgaaaaactggaatttaatacaccatttgtgttcatcatcagacatgatattactggatttatattgtttatgggtaaggtggaatctccttaa

SEQ ID NO: 744 - DNA, 756 bp, Vaccinia virus
atgagtctactgctagaaaacctcatcgaagaagataccatattttttgcaggaagtatatctgagtatgatgatttacaaatggttattgccggcgcaaaatccaaatttccaagatctatgctttctatttttaatatagtacctagaacgatgtcaaaatatgagttggagttgattcataacgaaaatatcacaggagcaatgtttaccacaatgtataatataagaaacaatttgggtctaggagatgataaactaactattgaagccattgaaaactatttcttggatcctaacaatgaagttatgcctcttattattaataatacggatatgactgccgtcattcctaaaaaaagtggtaggagaaagaataagaacatggttatcttccgtcaaggatcatcacctatcttgtgtattttcgaaactcgtaaaaagattaatatttataaagaaaatatggaatccgcgtcgactgagtatacacctatcggagacaacaaggctttgatatctaaatatgcgggaattaatatcctaaatgtgtattctccttccacatccataagattgaatgccatttacggattcaccaataaaaataaactagagaaacttagtactaataaggaactagaatcgtatagttctagccctcttcaagaacccattaggttaaatgattttctgggactattggaatgtgttaaaaagaatattcctctaacagatattccgacaaaggattga

SEQ ID NO: 745 - DNA, 387 bp, Vaccinia virus
atggagaatgttcctaatgtatactttaatcctgtgtttatagagcccacgtttaaacattctttattaagtgtttataaacacagattaatagttttatttgaagtattcgttgtattcattctaatatatgtattttttagatctgaattaaatatgttcttcatgcctaaacgaaaaatacccgatcctattgatagattacgacgtgctaatctagcgtgtgaagacgataaattaatgatctatggattaccatggatgacaactcaaacatctgcgttatcaataaatagtaaaccgatagtgtataaagattgtgcaaagcttttgcgatcaataaatggatcacaaccagtatctcttaacgatgttcttcgcagatga

SEQ ID NO: 746 - DNA, 354 bp, Vaccinia virus
atgaggactctacttattagatatattctttggagaaatgacaacgatcaaacctattataatgatgattttaaaaagcttatgttgttggatgaattggtagatgacggcgatgtatgtacattgattaagaacatgagaatgacgctgtccgacggtccattgctagatagattgaatcaaccagttaataatatagaagacgctaagcgaatgatcgctattagtgccaaagtggctagagacattggtgaacgttcagaaattagatgggaagagtcattcaccatactctttaggatgattgaaacatattttgatgatctaatgattgatctatatggtgaaaaataa

SEQ ID NO: 747 - DNA, 327 bp, Vaccinia virus
atggccgaggaatttgtacaacaaaggttggccaataacaaagtgacaatttttgtcaagtatacatgtcctttttgtagaaatgcactggatattctaaataagtttagtttcaaaagaggagcgtatgaaattgtcgatattaaagaatttaaacccgaaaatgaattgcgtgactattttgaacaaattactggtggtagaactgttcctagaatcttttttgggaaaacttctattggtggatatagcgacctgttggaaatagacaacatggacgcattgggtgatattctatcatctattggggtattgagaacttgttga

SEQ ID NO: 748 - DNA, 2178 bp, Vaccinia virus
atggaggtcacgaaccttattgaaaaatgtaccaagcactccaaagatttcgccactgaggtaaaaaaactatggaacgatgagttgagttctgaatcaggtctctcaagaaaaacaagaaatgtaattcgtaatattcttcgtgatatcactaagtcattaactacagataagaaatcaaagtgtttccgtatactagaacgttcgacgattaacggagagcagattaaagatgtatataaaactatttttaataatggtgttgatgtggagtctagaatcaacactacaggaaagtatgttctatttacagttatgacttatgttgctgctgaactacgactcattaagtcagacgagatattcgctcttctatcaagattttttaacatgatatgtgatattcatagaaaatacggatgtggtaatatgtttgttggtattcccgctgctctaattattctgttggaaattgatcacatcaataaactgtttagcgtgtttagtacaagatatgatgctaaggcatatctatatactgaatatttcctcttccttaacattaatcattatctacttagtggttcagatttatttatcaacgtagcatatggtgctgtatctttttcgtcacccattagtgttccagattatatcatggaagcactgacatttaaggcatgtgatcatattatgaaatctggagatctaaaatatacatatgcgtttactaaaaaggttaaggatctgtttaatactaaatctgattctatttatcaatacgttagacttcatgaaatgtcatatgatggtgtttcagaagatacggatgatgacgatgaggtattcgctatccttaacttgagtattgattccagcgttgatagatacagaaacagagttcttctactaactcccgaagtcgcgtctcttagaaaagaatattcagacgtagaacccgattataaatacttgatggatgaggaagtgcccgcgtacgacaagcatttgcctaagcctattactaacactggtattgaagaaccacacgctactggaggagatgaggaccaaccaattaaggttgtccatccccctaataatgataaagatgatgctatcaagccatacaatccattagaagatcctaattatgttcccacaattacaagaacggctataggaatcgctgattaccaactagttattaataaactaattgaatggttagataaatgcgaggaagaatgcggaaatagtggagagtttaaaacagagttggaagaagccaagagaaaactcaccgaattgaatgcagaacttagtgataaactcagtaagattaggactttggaaagggattctgtttataaaaccgaaagaatcgaccgacttacaaaagagatcaaagaacacagggatattcaaaatgggacagatgatggttcagatttattagaaattgataagaagactatccgagaattgagagaatcgcttgatagggaacgagaaatgcgttcagaactagaaaaggaactggatactattaggaatggaaaagtagatggatcttgtcaacgagaacttgaactcagtcgtatgtggctaaaacaacgcgatgacgatctccgagctgaaatcgataaacgtcgtaatgtcgaatgggaactgtccagacttcgtagggatatcaaggaatgcgacaaatacaaggaggatcttgataaggccaagacaactattagtaactacgtaagcaaaatcagtactctagaatcagaaattgctaaatatcaacaagatagggacacgctttctgtagtacgcagagaacttgaggaagaacgacgacgcgttagagatctcgaatctagactcgatgaatgtacacgcaaccaggaagacacgcaagaagttgatgcactgcgttcgcgtattagagaactagagaataagttgaccgactgcatcgagagcggaggaggaaatcttacagagattagcagactccaatctaaaatctcagatcttgaaagacaactgagtgaatgccgtgaaaatgctacagagattagcagactccaatctagaatatcagatcttgaaagacagttgaacgactgtagacgtaataatgaaaccaatgccgaaacagagagagatgcgacgtcttag

SEQ ID NO: 749 - DNA, 438 bp, Tuberculosis
atgagtgagcaggtggaaacccggttgaccccacgcgagcggctgacccggggtctggcctactctgcggtgggtccggtggacgtgacccgaggcctcctcgaactcggggtcggacttgggcttcagtccgcccggtcgaccgcggccgggcttcgccgccgttaccgggaaggccgattggcccgcgaggtcgctgccgcccaagagacgctcgctcaagagctgaccgctgcccaggacgtggtggccaacctaccgcaggccctacaggacgcccggacccaacgtcgcagcaaacaccacctctggatcttcgcggggatcgcggcggccatcctcgccggcggtgccgtcgccttcagcatcgtccggcgctcgtcgcgaccggagccgtcgccccgaccaccgagcgtcgaggtgcaaccgcgctcctga

SEQ ID NO: 750 - DNA, 846 bp, Tuberculosis
gtgaattacagcgaggtcgagctgttgagtcgcgctcatcaactgttcgccggagacagtcggcgaccggggttggatgcgggcaccacaccctacggggatctgctgtctcgggctgccgacctgaatgtgggtgcgggccagcgccggtatcaactcgccgtggaccacagccgggcggccttgctgtctgctgcgcgaaccgatgccgcggccggggccgtcatcaccggcgctcaacgggatcgggcatgggcccggcggtcgaccggaaccgttctcgacgaggctcgctcggataccaccgttactgcggttatgccgatagcccagcgcgaagccatacgccgtcgtgtggcgcggctgcgcgcgcaacgagcccatgtgctgacggcgcgacgacgggcacgacggcacctggcggcgctgcgtgcgctgcggtaccgggtggcgcacggcccgggggtcgcgctggccaaacttcggctgccgtcgccgagcggtcgcgccggcatcgcggtccacgccgcgctgtcgcgacttggccgtccctatgtctggggcgcaacggggcccaaccagttcgactgttccggtttggtccagtgggcctacgcccaggcgggtgttcacctggatcgcaccacctatcaacagatcaacgaggggatcccggtgccgcgctcacaggtccggccgggcgatctggtcttcccgcaccccgggcacgtgcagctggcgatcggcaacaatctggtcgtcgaggcgccccatgcgggcgcgtcggttcgggtcagctcgctgggcaacaacgtgcagattcggcgaccgctgagtggcagataa

SEQ ID NO: 751 - DNA, 564 bp, Tuberculosis
gtgccgtcgttcgacgtcgtgttcgtcggccaccgccgcggggaggttcgcagcgacaacgccatgctgggtctgctgtgtgacgcggcattcgacgagctaacccggcccgatgtggtgatctttccgggcggcatcggaactcggaccctgatccacgaccagaccgtgctcgactgggtgcgcgaagcgcaccggcacaccctactcaccacctcggtgtgcaccggcgggctggtgttggcggctgccggactgctcaacggcttgaccgcgaccacgcattggcgagtacaggatctgttcaactcgctgggcgcccgatacgtcccccagcgtgtcgtcgagcatctgccagagcgggtcatcaccgccgccggggtgtcgagcgggatcgacatgggattgcggctggtggagcttttggtcagccgggaagccgccgaagcgagccagctgatgatcgagtatgacccgcagccaccggtggatgccggctccctggccaaggcctcgccggctacccatcggctcgcgttggagttctatcagcatcgtttgtga

SEQ ID NO: 752 - DNA, 426 bp, Tuberculosis
atgtgcgccgacgcccagccgtcagggagcgttgggctgctcggacggaattgccccaccgcaaccacccggtggcggcgggccggggaggggctcaccgccgctgacacaatcgaagtaaaactgtgggccggtaaaccacgtttgcatccactggtgccaaaacgagccgtcggggtacttctcgccgtcgcacacggccaagtcgccaaaaccccatcggccacccgggcaatagcctttcgtcatgtccggctgatgcgggtcaggtggatctgcgctggcaaccgaggcaggaaacacaagcgccgctgcacaacccagtatcgcagtactcaggcgagcaaacttcaacttcatttcaaactccgtcaaacgttgaatcgactcggcggactccaagcgatggtcagcgcttgcggatga

SEQ ID NO: 753 - DNA, 663 bp, Tuberculosis
atgagtaacgccaacttctcgatcctggtcgacttcgccgcgggtgggctggtgttggcgtcggtgctgattgtctggcgccgcgacctgcgggccattgtgcggctgctggcctggcagggtgctgcgctggccgcgatcccgctactgcgcggcatccgcgacaacgaccgtgcgctgatcgcggtgggcatcgccgtgttggcgctgcgcgcgctggtgttgccctggctgctggcccgcgcggtgggcgccgaagcggccgcgcagcgggaggccaccccgttggtcaacaccgccagctcgctgctgattaccgccggactgaccctcaccgcgttcgcgatcacccagccggtggtcaacctggaaccgggcgtcaccatcaacgcggtgccggccgcgttcgcggtggtgctgatcgcgctgttcgtgatgaccacgcggctgcacgcggtctcgcaggccgccggattcctgatgctagacaacgggatcgcggcgaccgcattcctgctcaccgccggggtgccgctgatcgtcgaacttggtgcctcgctggacgtgctgttcgcggtcatcgtgatcggcgtgttgaccggccggctgcgccgcattttcggcgatgccgacctggacaagctgcgggagttgcgggattga

SEQ ID NO: 754 - DNA, 1491 bp, Tuberculosis
atgtcgcttttgatcacatcaccggcgacggtggctgcggcggcaacacatctggcgggtatcggatcggcgctcagcacagccaacgcggcagcggccgctccgacgacggcgctatcggtcgcgggtgccgatgaggtctcggtgctgatcgcagcgctattcgaggcgtacgcccaggagtatcaggcgctgagtgcccaggcactggcgttccacgaccagttcgtgcaggcgctcaacatgggtgcggtttgctatgcggccgcagagacagccaacgcaactccgctgcaggctctgcagactgtgcagcagaacgtcctcaccgtggtcaacgcgcccacccaggcattgctaggtcgaccaatcatcggcaacggtgccaacgggttaccgaacaccgggcaagacggtgggcccggcgggttgctgttcggcaacggtggcaacggcggatccggcggggtggatcaggccggtggtaacggcggtgcagccggcctgatcggtaacggcgggtccggcggcgtcggcgggccggggatagctggcagtgcgggcggggcgggcggcgccggtgggctgctgttcggcaacggcgggcccggcggggccggtgggattggcaccaccggtgacggtgggcctggcggtgccggcggtaacgccatcggtctgtttggcagcggaggtaccggcgggatgggcggcgtcggcggcatgggcggtgtcggcaacggcggcaacgcgggtaacggcggcaccgccggactgttcggtcacggcggggccggcggtgccgggggcatcggcagcgccgacggcgggctcggtggtggcggcggcaatggccggttcatgggcaacggtggggtcggcggtgccggcggctacggcgctagcggagacggcggaaacgccggcaacggcggcttgggcggcgtgttcggcgatggcggggccggtggtaccggcggtctgggtgacgttaacggcgggcttgccggtattggcggtaacgccgggttcgtccgcaacggcggagccggcggcaatggccagctcggcagcggcgcagtctcctcggcgggtgggatgggcggcaacgggggcttggtgttcggcaacggcggccccggcggtctaggcgggccgggcacgtcggccggcaacggcggtatgggcggcaacgctgtcggactgttcggccagggcggggccggcggggccggcgggtccggattcggggccggtattccaggtggcaggggcggtgacggcggtagcggcgggctgatcggcgacggcggcaccggtggcggtgcaggcgcgggtgacgctgctgcatcggccggtggtaacggtggtaacgcccggttgatcgggaacggcggtgacggtggcccgggcatgttcggcgggcccggcggagctggcggcagcggcggcacgatattcggcttcgccggaacccccgggccgagctag

SEQ ID NO: 755 - DNA, 756 bp, Tuberculosis
atgcgtcgagtggttcgttatctatccgttgtggtcgcgatcacgctgatgctcaccgcggaatcagtcagcatagcgaccgccgcggtcccgccactccaaccgatcccaggcgttgcgtcggtgtcgccggctaatggtgccgtggtgggggtggcgcacccggtggtggtgacattcaccacgcccgtgaccgatcgccgcgccgtcgagcggtccatccgcatcagcacaccgcacaacacgaccggacacttcgagtgggtcgctagcaatgtcgtgcggtgggtgccccaccggtattggccacctcacacccgtgtctcggtgggtgtgcaggaactgaccgaaggattcgagaccggtgacgcactgatcggggttgccagcatctcggcacataccttcacggtcagcagaaacggagaagtcctccgcaccatgcccgcgtcgttaggcaagcccagccgcccgacaccaatcggtagctttcacgcaatgtccaaggagcgcacggtcgtgatggactcgcgtaccatcggcatcccgctgaattcctcggacgggtatctgctcaccgcccactacgcggttcgtgttacctggagcggcgtgtacgtgcactcggccccctggtcggtcaactcgcagggatacgccaacgtcagccacggctgtatcaacctcagcccggacaacgcggcatggtacttcgacgccgtcaccgttggtgatcccattgaggtggtcggctag

SEQ ID NO: 756 - DNA, 369 bp, Tuberculosis
atgacgaagaagccacgtaaccccgccgactacgtgatcggcgacgatgtcgaggtgtctgacgtcgatctcaagcaagaggaggtctatgtcgatggcgagcggctaacggacgagcgcgtcgagcagatggcttcagagtcgctgcggctggcgcgcgaacgagaagccaacctgattcctggcggcaagtctctgtccggcggctctgcgcactcgccggctgtgcaggtggtcgtttcgaaggctacccacgccaagctcaaggagctggcgcgcagccggaagatgagcgtatctaagctgctgcgtcccgtgctcgacgagttcgtacagcgagaaacgggtcggattctcccacggcgttag

SEQ ID NO: 757 - DNA, 870 bp, Tuberculosis
atgtcgaccgctgctgtgctgcgcgcccgcttcccgcgggcggtcgccaaccttcgtcaatatggaggtgcggcggcccgtggattggacgaggccggccagctcacctggttcgctttgaccagcatcgggcagatcgcgcacgcgctgcgctactaccgcaaggagacgctgcggctgatcgcccagatcggcatgggtaccggcgcgatggccgtcgtcggcggcacggtcgccatcgttggctttgtcacgctgtccggcagctcgctggtcgcaatccagggcttcgcgtcgctgggcaacatcggtgtcgaggcgttcaccgggttcttcgccgcactgatcaacgtgcgcatcgccggcccagttgtcacgggtgtcgccctggcggccacggtcggtgcgggtgctacggccgagctgggcgcgatgcggatcagcgaggagatcgatgccctggaagtgatgggcatcaagtcgatctcgtttctggcctccacccggatcatggccgggctggtggtgatcatcccgctgtacgcgttggcgatgattatgtcgttcctgtccccgcagatcaccaccacggtgctctacgggcagtcgaacggcacctacgagcattactttcaaacgttcctgcgtcccgacgatgtcttttggtccttcttggaggccctcatcatcactgcgatcgtcatggtcagccactgctactacgggtacgccgccggtggaggccccgtcggtgtcggcgaggccgtcggccgatcgatgcgtttctcgttggtctcggtgcaggtcgttgtcctgtttgcagcgttggcgctctacggtgtcgacccgaacttcaatctcacggtgtag

SEQ ID NO: 758 - DNA, 549 bp, Tuberculosis
atgttcgacattgcaacgcgtttcaaaaactcctacgggtcaggtccattgcacctgctggcgatggtgtctggcttcgccctgctgggctacatcgtggccaccgccaggccctcggcgctgtggaaccaggccacctggtggcagtcgatcgcggtctggtttgtcgccgccgtcgtagcccacgacctgctgttgtacccgctctacgcgctggccgaccggatcctggccaggctagtcggcaggcgcgacgtctcggcgccccgccgccgcccggaactaccggtacgcaactacattcggatcccggcgctggcagccggcttgacgctgctggttttcctgcccggcatcatcagacagggtgcgccgacatacctggatgcgaccggacagacgcaggaaccatttctgggcaggtggttgctgctcaccgcggtcgcgttcgggatcagcgcggccgcttacgccattcggctggtggtggcgcacgtgaggcggcgccgagcggggtgttcgcgggtcgacgcgatcgacgaggagtag

SEQ ID NO: 759 - DNA, 744 bp, Tuberculosis
atgaacctgatcttgacggcccacggaacccgcagaccgtccggtgtcgcgatgatagcggacatcgccgcgcaagtgagcgcgctcgtcgaccgcactgtgcaggtcgccttcgttgatgtgctcggaccctcacccagcgaagtgctttccgccctttcctgccgtcccgcaatcgtggtgcccgcgttcttgtcccgcggatatcatgttcgcaccgacctgcccgctcatgtcgcagccagtgcgcacccgcatgtcacggtcacccccgcgttggggccatgccgtgagatcgcgcagatagtcacccagcagctggtggaatccggttggcgtcctggcgattcagtgatcctcgcagcggccggcgcgtcggataggcgggcacgtgccgacctgcacaccactcggacgctagtgtccgaactgaccggatcatgggtggacatgggatttgcgggcaccggcggtccggatgtgcgcacggctgtgcagcgggcccgagaccgggccgaagccaaccgaggtgcgcgccgcgtcgcggtcgcctccttcctgttggcagaaggcctttttcaagagcggctgcgggcatccggtgccgatgtggtaacccgaccgctcggcacccatccgggcttggcacagctggtcgcgaaccgatttcgcagcgcggtagcacgtcagcaacggctgcaccgctggcatggcacgccgacaccggtgacgcttgatctttga

SEQ ID NO: 760 - DNA, 1776 bp, Tuberculosis
gtgtcctttgtgatcgcacaaccggagatgatcgcggcggcggccggtgagttggccagcatcagatcggcgatcaacgcggccaatgcggcggccgcggcccagaccaccggagtcatgtcggcggccgccgacgaggtgtctacggcggttgccgcgctgttttcctcgcatgcccaggcctatcaggccgccagcgcgcaagcggccgcctttcacgcccaggtggtgcggaccctgaccgtggacgcgggagcgtatgccagcgccgaggccgccaacgccgggccgaacatgctggccgcggtcaacgcccccgcccaggcgctgttggggcgcccactgatcggcaacggtgccaacggggcgccgggcaccgggcaggccggcggcgacggtgggctgttgttcggcaacggcggcaacggcgggtccggcgcacccggacaggccggcggggccggcggggcggccgggttcttcggcaacggtggcaacggcggggacggcggggccggagcgaacggcggcgccggcggcaccgccggctggttcttcggcttcggcggcaacggcggggccggcgggatcggtgttgccggcatcaacggcggtctcggcggcgccggcggcgacggcggcaacgccgggttcttcggcaacggcggcaacggcggcatgggcggggccggggcggccggcgtgaacgccgtcaatcccggcctggccaccccggtcaccccggcggccaacggcggcaacggcctcaacctcgtcggcgttcccggcaccgccggtggcggcgccgatggcgccaacggcagtgccattggccaggcgggcggcgctggcggtgacggcggcaacgcctccacgagtgggggcatcgggatcgcgcaaaccgggggcgccggcggcgctggcggtgccggcggcgacggcgcacccggtggcaacggcggcaatggtggcagcgtcgagcacactggcgctaccggctcctctgcgagcggcggcaatggtgccaccggcgggaacggcggggtcggtgcgcccggcggtgccggcggcaacggcggccacgtcagcggcggatcggtcaacacagccggcgccggtggcaaaggcggcaacggcggcaccggcggcgccggcggcccgggcggccacggcggcagcgttctatccggcccggttggcgacagtggcaacggtggtgccggcggggacggcggggccggggttagcgccaccgatatcgccggcaccggcgggcgcggcggcaacggtggtcatggcgggctgtggatcggcaacggcggcgacggtggtgcgggcggtgtcggcggtgtcggcggggccggtgcggctggcgcgatcggcggccacggcggcgatggcggctccgtaaatacccctattggcggcagcgaggccggtgacggcggtaagggcggcctgggcggggacggcggtgggcgcgggatattcggccagtttggggccggcggggccggtggtgccggaggcgtcggcggcgccggcggggctggcgggaccggcggcggcggcggcaacggtggggccattttcaatgccggtacccccggcgccgccggcacgggcggtgacggcggtgttggcgggaccggtgcggccggcgggaaaggcggggccggcggtagcggcggcgtcaacggcgccaccggcgccgacggcgccaagggcctcgacggtgccaccggcggcaaaggcaacaacggcaaccccggctga

SEQ ID NO: 761 - DNA, 627 bp, Tuberculosis
atgcgcctcacacatccggcccgacggtacctatccagtcaggctgcccggccaacaggcgcgttcggccgcctactgggacggatctggcgagccgagaccgccgacgtcaatcgcatcgccgtcgagctgctcgcgcccggcccgggcgagcgggtttgcgagatcggctttggccccggccgaacccttgggctgctcgccgccgccggcgcgcaagtgagcggcgtcgaggtgtcgacgaccatgatcgcaatcgcggcccatcacaacgcgaaagccattgcagccggcctgatctcgctttatcacggcgatggagtaaccctgccggttgccgaccacagccttgacaaggtgctcggcgtgcacaacttttacttctggcccgatccccgcgccagcctttgcgacatcgctcgagccctgcggcccgggggtcgactcgtccttacatcgatatccgatgaccaaccactggcggcccgtttcgatcccgcgatctatcgcgtgccccccaccctcgacaccgccgcgtggcttggcgctgccggcttcatcgacgtcggcatcaagcgcagtgcagaccatccggcgaccgtgtggttcaccgcaactgcgacgtga

SEQ ID NO: 762 - DNA, 2649 bp, Tuberculosis
gtgaccacgcaaacgctcatcaggctgatactgggcatgagcatgaccgcggtggtgggggtgttcgctctgcggcgagtctggtggctttacaagctggtcatgtccgggcagccggccagcgggcgaaccgacaacctcggcacccgcatctggacccagatctccgaggttctagggcagcgccgactgttgaaatggtcgatcccgggcctggcgcactttttcaccatgtggggcttcttcatcctgctcaccgtctatatcgaggcttacggcctgctgttcgaggagagattccacatcccggtcatcggccggtgggacgcgttgggcttcctgcaggacttctttgccaccgccgtctttctcggtatcacgaccttcgccatcatccgtatcctgcgcaacccccgcgagatcggtcggagctcccggttctacggatcgcacaacggcggcgcgtggctcgtcctgttgatgatcttcaacgtcatctggacctacgtgttggtccgcggctcagcggtcaacaacggcaccctgccctacggcaacggggccttcctatcgcagctattcggcgcgattcttcgccccctcgggcagcccgccaacgaaatcatcgaaaccacagcgctgttgctgcacatcggggtcatgcttgcgttcctgatcctcgttttgcattccaagcacctgcacatcttcctggcgcccattaacgtcacgttcaaacggctgccggatgggctgggcccgctgttgccgctcgaagccgatggcaaaccaatcgacttcgagaatcccagcgaggatgccgtattcggccgcggcaagatcgaagacttcacctggaaggggatgctcgacttcgctacctgcaccgagtgcggacgctgtcagtcgcaatgcccggcctggaacaccggcaaaccgttgtcgcccaagctggtcatcatggacctgcgcgaccattggatggccaaggcgccctacatcctgggccaaaaggatgccagcgcgggcggcgaggccggtcaccaagagcatcatcacgtgccggaatcggggttcggtcgagtgcccgggcatggaccggagcaggcgactcgcccgctggtcggcaccgaggaacagggtggcgttatcgatcccgacgtcttgtggtcatgtgtgacctgtggtgcctgcgtcgagcagtgcccggtggatatcgaacatgtcgatcacatcgtcgatatgcgccgctaccaggtgatgatggagtcggagttcccctccgagctgtcggtgctgttcaagaacctggagaccaagggcaacccgtggggtcagaacgcctcagatcgcaccaactggatcgacgaggttgacttcgacgtccccgtgtacggccaggacgtcgacagcttcgacggctacgagtacctgttctgggtgggttgtgcgggcgcctacgacgacaaggccaagaagaccaccaaggccgtcgccgagctgctcgccgtcgccagggtgaaatacttggtgctgggcgctggggaaacctgcaacggcgactcggcgcgccgctccggcaacgagttcctcttccagcagctggcacaacaggccgtcgagaccctggacggtttgttcgagggtgtggagaccgtcgaccgcaagatcgttgtcacctgcccgcactgcttcaacaccatcggcaaggaatatcggcagctgggcgccaactacaccgtgctgcaccacacccagctgctcaatcggttggtgcgcgacaagaggctggtccctgtcactccggtttctcaggacatcacctaccacgacccgtgctacctgggtcggcacaacaaggcctacgaggcaccacgggagctgatcggtgccgcgggggccagcctgaccgagatgccgcgccatgccgaccgcagcttttgttgcggcgcaggcggcgcccgcatgtggatggaagaacacatcggcaagcggatcaaccatgaacgcgtcgatgaggcgctggccaccgatgccaccgcaatcgccaccgcgtgcccattctgccgggtgatggtcaccgacggtgtgaacgatcggcaggaagaagccggccgcagcggcgtcgaggtgctcgacgtggcccaggtgctactcggatcactagaccacgacaaggcgcagctgccggccaagggtacggccgccaaacaggctcaggagcgcgccccgaaagccgctcctaaggctgccgcaccggtgacgcccgtggaggcacccgccgaggcaccacaggcgccagcgccggccgctcccgcagcacccgtgaaaggcctcggcatggccgccggcgccaagcggcctggcgccaagaaagcggccccaacgcccgcggccccggctgcgcccgccgcgcccgttaaagggctgggtattgccgccggcgccaagcggcccggggcgaaaaagacacctcccccggctcctgggctcgccgagccagcagcccagccgcaacccgaagcaaagccgcaaccggagcccgccgcaccgccaaagccgcaaaccgacggtgatccggctgcaccggccgcgccggtgaaagggctgggcattgcgcgcggggcccgtccaccgggcaaacgctga

SEQ ID NO: 763 - DNA, 561 bp, Tuberculosis
gtgcggctatcgctcattgcacggggtatggcggccctgctggcggctaccgcgctagttgccggctgcaacaccaccatcgacggcaggccggtcgcttcgccagggtcgggacctaccgagccgacttttccgacgcctaggccaactaccgcgccgccggggaccaccgccccgacgctaccgacgacaccggtcagcccgaccgcgccggccggcgccattccgctcccgcctgactccaacggttacgtcttcatcgaaaccaagtccggaatgacgcgttgccagatcaatagggacagcgttggctgcgaggcaccgttcaccaactcccccttgcgagatggtgagcacgccaacggcatccacatcaccgccggcggctccgtgcagtgggtgttgggcaatctgggcgccatccccaccgtcagcatcgactaccgaacctatgaggcgcagggctggaccatcgacgccaccaccgatggcacccgcttcacgaacaaccgcacgggccatggcatgttcgtcagcatcgagaaggtcgacacattctga

SEQ ID NO: 764 - DNA, 966 bp, Tuberculosis
atgaccccggctcaacttcgggcctattcggcggtggttcgcctgggctcggtacgggcggccgccgcggaactcggtctttccgacgccggagtctccatgcacgtcgcggcgctgcgcaaggaactcgacgacccgctgtttaccaggaccggtgccgggctggcgttcacgcccggcgggctgcggctggccagccgcgcggtcgaaatcctgggcctgcaacaacaaaccgcgatcgaggtcaccgaggccgcccacgggcgtcggttgctgcgcatcgccgcctccagcgccttcgccgaacacgccgcgccgggcctgatcgagctcttctcgtctcgggccgacgacctttcggtcgagttgagcgtgcatcccaccagccggttccgcgaactgatctgctcgcgcgccgtcgacatcgcgatcggcccggccagtgagagctcgatcggttccgacggctcgatctttctacggcccttcctgaagtatcagatcatcaccgtcgtcgcgccgaatagcccactggccgcaggcattccgatgcccgcgctgttgcgtcaccagcaatggatgttgggtccgtccgccggcagcgtagatggtgagatcgcaaccatgttgcgcggcttggcgattccggagtcccagcaacggatcttccagagcgatgccgccgcgctggaggaggtcatgcgcgtcgggggcgccacgctggccattggctttgcggtcgccaaggatcttgccgccggacggttggtgcacgtgaccggtcctgggctggatcgcgccggcgagtggtgtgtggcgacattggcgccttcggcccgccaacccgccgtctccgagcttgttggcttcatcagcaccccgaggtgtattcaggcgatgatcccgggtagcggggtcggggtgacgcggttccgcccaaaggtccacgtcaccctgtggagctag

SEQ ID NO: 765 - DNA, 1173 bp, Tuberculosis
gtgggcctcgaggaccgggacgcgttgcgggtgttgcaaaacgccttcaagctcgacgacccggaactggtccgccgcttctatgcccattggtttgccctcgacgcctcggtacgcgacctgttcccacccgacatgggcgcccagcgagccgctttcgggcaggcgctgcactgggtgtacggcgagctggtggcgcagcgcgccgaggaaccggtggcctttcttgcccagctcggccgcgaccaccgcaaatacggtgtgctgccaacccagtacgacacgttgcgccgcgcgctgtatacgaccctgcgtgactatctgggccatccaagccggggcgcctggacggacgccgtcgacgaggccgccggccagtcgctcaacctgatcatcggggtgatgagcggtgccgcggacgccgatgacgcgcccgcctggtgggacggcacggtcgtcgagcacatccgggtgtcacgcgaccttgctgtcgctcggctgcagctggaccgcccgctgcactattaccctggccaatacgtcaacgtgcatgttccgcaatgcccccgccggtggcgatatctcagcccagccattccggccgacccgaacgggcggatcgagtttcacgtccgggtggttcccggtggcctggtcagcaacgccatcgtgggtgaaactcggcccggtgaccggtggcgattgtccggtccgcacggagcctttcgggtggaccgcgacggcggcgacgtgctcatggtcgccggtagcaccgggctggcgccgctgcgggcgctgatcatcgacctcagccgcttcgcggtgaatccgcgcgtgcacctgttcttcggagcacgctatgcctgcgaactctacgacctgcccacgctgtggcagatcgcggcgcacaatccgtggctgtcggtctcgccggtgtcggagtacaacggtgatccggcttgggccgccgactatcccgacgtgtcggcgccgcgcggtctgcacgtgcgccagaccggccgactacccgatgtggtctcccgatacggcggctggggcgatcggcagattctgatctgcggtggaccggccatggtccgcgccaccaaggccgccctgatcgccaaaggcgcgccaccggagcgcattcagcacgacccactgtcgcgctag

SEQ ID NO: 766 - DNA, 543 bp, Tuberculosis
atggatttcggtgcgctaccaccggaaatcaactccgccagaatctattccggtcccggctccaggcccctgatgcaagcggccgcagcctggcaacggctggccaacgaactgaccgcgacggcggcttcctactcctcggtgatttccgggctcaccggcgatgactggctgggcccgtcggcactgtcgatggcggccgcggccgtcccctatgtcgcgtggatgagggccaccgccgcctcggccgagcaggccgcggctcaggccgtggccgcggcgaacgcctacgagtcggcgtacgcggcgaccgtgcccccgacggtaatcgcggccaaccgccgcacaatgctgtcactggtccagaccaatgtttttggacagaacaccccggcgatcgcgactagtgaaacgcactacggcgaaatgtgggcccatgacatcttggcgatggacggctatgcgggcgcctcgggggccgcgtcccagttgcgccgttcacccgccaccggcgaccaccagcggggccgggtcgctgagtga

SEQ ID NO: 767 - DNA, 369 bp, Tuberculosis
ttgctggccaccttctggggctggcgcgcccagcaactgcccgacggcaccgtgatttggacgctgccgggtgaccagacctatgtcaccaccccgggcagcgcgctgctgttcccggcgctgtgcacccccaccggtgacccacctcgacccgacccggcccgcgccgaccgccgcgggcagcgcaccgcgatgatgccgcgccgggccagcacccgagcgcaaaaccgcgcccactacatcgccgccgaacgccaccgcaaccaccaagcccgccggattgcccacgtggtcacccaaaccgccacaaccgcccccgagactaacggcccaccacccgatcccgacgacgacccgccgcccttctaa

SEQ ID NO: 768 - DNA, 798 bp, Tuberculosis
atgacgccgccgcgggtgttgagcatcgccggatcggactccgggggcggtgccggcatccaagccgatatgcgcacgatggcactgctaggagtgcacgcgtgcgtcgcagtcacggcggttaccgtacagaacacgttgggagtcaaggatattcatgaagttcccaacgatgtggtggccggccagatcgaggcggtcgtcaccgacatcggcgttcaagccgccaagaccgggatgctggcctcgtcgcgcatcgttgcgaccgtggccgcgacctggcgtcggctcgagctgtccgttccgctcgtcgtcgacccggtatgcgcatccatgcacggagacccgctgttggcaccgtctgccctggattcgcttcgcggtcagctgttcccgttggcgacgctgctgacccccaaccttgacgaggcgcgcctgctggtagatatcgaggtagtcgacgccgagtcgcagcgtgcggcggccaaagccctgcatgcgctggggccgcagtgggtgctggtcaaaggcggacacctgcgctcgtcggacggcagctgcgacctgctctatgacggcgtcagctgctaccagttcgacgcgcagcgactacccaccggcgatgaccatggcggtggtgacacgctggcgaccgcgatcgccgccgcgttggcgcacggcttcaccgtgcccgacgcggtggacttcgggaagcgatgggttaccgaatgcctgcgcgcggcctatccactgggccgcggccacgggcccgtttcgccgctgtttcggctgtcatga

SEQ ID NO: 769 - DNA, 861 bp, Tuberculosis
atgatcggaaagccccgcggcaggcgaggggtaaacctgcagatactgcccagcgcgatgacggtgctgtccatttgcgcgggactgaccgcaatcaagtttgcgctcgagcaccagccgaaggccgcgatggcactgatcgccgcagcggccatcctcgacgggctcgacggccgggtggcccgcatcctggatgcccagtcgcggatgggcgcagagatcgactcactggccgacgcggtgaacttcggagtgacacccgcgctggtgctttacgtgtcgatgttgtcgaagtggccggtcggttgggtggtcgtgctgctctacgcggtgtgcgtggtattacggctggcgcggtacaacgcactgcaggacgacggaacccagcccgcctacgcgcatgaattcttcgtcggaatgcccgcgccggcgggcgcggtttccatgatcggcctgctagccctcaaaatgcagttcggcgaaggatggtggacctcgggctggttcctcagcttttgggtgacgggaacgtcgatactcttggtcagcgggatcccgatgaaaaagatgcacgccgtgtcggtaccacccaactacgcggccgccctgctggcggtgctggctatctgcgcggcggccgcagtcctggccccctacttgttgatctgggtgatcatcatcgcctacatgtgccatattcctttcgcggtgcgcagccagcgctggcttgcccaacaccctgaggtgtgggacgacaagcccaagcaacggcgcgcggtgcggcgcgcgagccgccgggcgcatccctaccggccgtcgatggcgcggctgggcctgcgcaagccgggtcgacggctgtga

SEQ ID NO: 770 - DNA, 423 bp, Tuberculosis
atgtcgtcggaggagaagctggccgccaaggtgtccaccaaggcctccgatgtggcttccgacatcggcagcttcatcaggtcgcaacgtgagacggcgcacgtctcgatgcggcagctcgccgagcggtccggcgtcagcaatccgtacctgagccaggttgagcgcggattgcgtaagccgtccgccgacgtgttgagccagatcgcaaaggcgctgcgggtctcggccgaagtcctttatgtgcgcgccgggattctcgagcccagcgagaccagtcaggtgcgtgacgccatcatcaccgatacggcgatcaccgagcgtcagaagcagattctgctcgatatctacgcgtcatttacccaccagaacgaagccacccgggaggagtgtccgagcgatccgacaccgaccgatgactag

SEQ ID NO: 771 - DNA, 843 bp, Tuberculosis
atgcgaatcgcgttggcgcaaatccgcagcggtaccgaccccgccgccaatctgcaactggtcggcaagtacgccggcgaagccgccaccgcgggcgcacagctggtggtgtttcctgaggcgaccatgtgccggctcggtgtcccgctgcggcaggtcgccgagcccgtcgacggaccctgggcaaacggagtccgacggatcgcgaccgaggcgggcatcaccgtgatcgccggcatgttcaccccgaccggcgacgggcgggtaacaaacacgctgatcgcagccggcccgggcacgcccaatcagccggacgcgcactaccacaagatccacctctatgacgcgttcggcttcaccgagtcacgtaccgtcgcacccgggcgcgaaccggtggtagtcgtggtcgacggcgtgcgggtgggtttgaccgtttgctacgacattcgctttcccgccctttataccgagctggcgcggcgcggggcccaactgatcgcggtctgtgcatcctggggttccggtccgggcaaactcgaacagtggacgttgctggcccgcgcccgggcgctagactccatgagttacgtcgccgcggccggccaagcagacccaggtgatgcccgcaccggcgtgggggcgagctcggctgcaccgaccggggtaggcggcagcctggtggcctcgccgctaggcgaggtggtggtgtcagctggcacccagccgcaactgctggtcgccgacatcgatgtcgacaatgtggccgcggctcgcgaccgcattgcggtgctacgcaaccagacagacttcgttcagatcgataaggcacaatcgcgtgggtga

SEQ ID NO: 772 - DNA, 756 bp, Tuberculosis
atgacgacaatcggcacccgcaagcgagtcgccgtggtcaccggcgccagttccggtatcggcgaggcaaccgcgagaacccttgcggcccaggggtttcacgtggtcgcggtggcgcgtcgggcggaccggatcaccgcgctggccaaccagatcggcggaaccgcaattgtggccgatgtcactgacgacgccgccgtcgaagcgttggcccgcgcgctgagccgggtggacgtgctggtcaacaacgccggtggcgccaaggggcttcagttcgtcgccgatgccgatttggagcactggcgatggatgtgggacaccaacgtactgggcacgctgcgggtaacccgcgcgctgctgcccaagctgatcgactccggcgacggcctgatcgtcaccgtcacctcgatcgccgcgatcgaggtgtacgacggcggcgccggctacaccgctgccaagcacgcgcagggcgcgctgcatcgcacgctgcgcggcgaactgctggggaagccggtccggctcaccgagatcgctccaggtgcggtcgagaccgaattttcgctggtccgcttcgacggcgaccagcaacgcgcggacgcggtttatgccggcatgacaccgctagtagccgccgacgtcgccgaggtgatcggattcgtggccacccggccctcacacgtcaaccttgaccagatcgtcatccggccccgcgaccaggcatcagctagccgtcgcgctacccacccggtccgttag

SEQ ID NO: 773 - DNA, 1647 bp, Tuberculosis
atggacgtcgctttgggggttgcggtcacggatcgggtcgcgcgtctggcgctggtcgactcggctgcgcccggcaccgtgatcgaccagttcgtgctcgatgtggccgagcacccggtcgaggtgttaaccgagaccgtggtgggcacggatcggtcattggccggcgaaaaccaccggctggtcgctacccggctgtgttggccggatcaggccaaagctgacgagctgcagcacgcactgcaggactccggggtccacgacgttgccgtgatatccgaggcgcaggccgccacggcgctggtcggggcggcacatgccggctctgccgtgctgttggtgggtgatgagacggcaaccttatcggtggttggtgacccggacgcgccgccgacgatggtggccgtcgcgccggtggcgggcgccgacgccacatcgaccgtcgataccctgatggcccggctcggcgaccaggccctcgccccgggggatgtcttcctggtgggtaggtccgccgagcacaccacggttcttgccgaccagctgcgcgcggcgtcgacgatgcgcgtgcagactcccgacgaccccacgttcgcgctggcccgtggcgcggcgatggcggccggcgccgctacgatggcgcacccggccctggtcgcggatgcgaccacttcgctcccccgggccgaggcggggcaatcgggttctgaaggcgagcagctggcgtactcgcaggccagcgattacgagctgcttccggtcgacgaatatgaggaacacgacgaatacggggcagccgcggatcgctcggcgccgttgagccgacggtcgctgctgatcggcaacgctgtcgtggcctttgcggtgatcggtttcgcctcgctggcggtggcggtggcggtcaccatccgaccgaccgcggcctcaaaaccggtagagggacaccaaaacgcccagccagggaagttcatgccgttgttgccgacgcaacagcaggcgccggtcccgccgcctccgcccgatgatcccaccgctggattccagggcggcaccattccggctgtacagaacgtggtgccgcggccgggtacctcacccggggtgggtgggacgccggcttcgcctgcgccggaagcgccggccgtgcccggtgttgtgcctgccccggtgccaatcccggtcccgatcatcattcccccgttcccgggttggcagcctggaatgccgaccatccccaccgcaccgccgacgacgccggtgaccacgtcggcgacgacgccgccgaccacgccgccgaccacgccggtgaccacgccgccaacgacgccgccgaccacgccggtgaccacgccgccaacgacgccgccgaccacgccggtgaccacgccaccaacgaccgtcgccccgacgaccgtcgccccgacgacggtcgctccgaccaccgtcgccccgaccacggtcgctccagccaccgccacgccgacgaccgtcgctccgcagccgacgcagcagcccacgcaacaaccaacccaacagatgccaacccagcagcagaccgtggccccgcagacggtggcgccggctccgcagccgccgtccggtggccgcaacggcagcggcgggggcgacttattcggcgggttctga

SEQ ID NO: 774 - DNA, 633 bp, Tuberculosis
gtgctgccctgtctcaacgaggaggagtcactcccggcggtgctggccgcgatcccggccggctatcgggcgctagtggtggacaacaacagcaccgatgacaccgcgacggtggccgcccgccacggtgcccaggtggttgtcgagccgcggcccggatacggctcggcggtgcatgccggtgtgctcgccgcgaccacccccatcgtagcggtcatcgacgccgacggctcgatggatgccggcgacttgcccaagctggtcgccgaactcgacaagggcgccgacctggtgaccggtcggcggcggccggtggcgggcctgcactggccatgggtcgcccgggtgggcaccgtggtgatgagctggcggctgcgcacccgccaccgcctgccggtgcacgacatcgcgcccatgcgggtcgcccggcgagaggccctgctggatctgggcgttgtcgatcgacgctcgggttacccgctggagctgctggtccgggccgctgcggcgggctggcgtgtcgtcgaactcgacgtcagttacggtccccggaccggcggcaaatccaaggtcagcggttcgctgcggggcagcatcatcgcgatcctggacttctggaaggtgatctcgtga

SEQ ID NO: 775 - DNA, 414 bp, Tuberculosis
gtgagagcatcgcccacttcgccgccggagcaggtggtcgtcgacgcgagtgccatggtggatctactggctcgcactagcgatcggtgctctgcggtgcgcgcgcggctggctcggaccgcgatgcacgcgccggcgcacttcgatgcagaggtgttgtcggcgctggggcgcatgcagcgcgccggcgcactcaccgttgcctatgtcgatgcggcactggaggagttgcgacaggtgccggtgactcgacacggtctttcgtcgctgcttgctggagcgtggtcgcgccgcgacaccctccgcctgaccgatgccctctacgtcgagctggccgaaacggcaggtctggtgttgttgaccaccgacgaaagattggcacgcgcctggccctcggctcacgccatcggctga

SEQ ID NO: 776 - DNA, 267 bp, Tuberculosis
ttgttgagccggcgcacgaaaacgatcgttgtgtgtacattggtgtgtatggctcggttgaacgtgtatgtgcccgacgaattggcggagcgcgccagggcgcggggcttgaacgtctcggcgctgactcaggccgcgatcagtgccgagttggagaactccgcaaccgatgcgtggcttgaggggttggaacccagaagcaccggcgctcggcatgatgacgtgctgggtgcgatcgatgccgctcgcgatgagttcgaagcgtga

SEQ ID NO: 777 - DNA, 981 bp, Tuberculosis
gtgatacccgtgctgccccccctagaagccctgctggaccgcctgtatgtggtggccctgccgatgcgagtgcgtttccgcggcatcaccacccgtgaagtggccttgatcgagggtccggccggttggggcgaattcggtgcgttcgtggagtaccagtccgcgcaggcgtgcgcgtggttggcgtcggcgatcgagaccgcctactgtgcgccgccgccggtgcgacgtgaccgcgttccgattaacgccactgtgccggccgttgccgccgcccaggtgggcgaggtgctggcccggtttcctggggcccggacggccaaggtgaaggtcgccgagcctgggcagagcttggccgacgacatcgagcgtgtcaacgcggttcgggagctggttcccatggtgcgggtggacgccaacggtggctggggtgtcgccgaggcggtggccgcggcggccgccctgaccgccgacggcccgctggaataccttgaacaaccctgtgccaccgtcgccgaactcgccgagttgcgccggcgggtggatgtgccgatcgccgccgacgaaagcatccgcaaggccgaggatccgttggccgttgtccgcgctcaggccgccgatatcgcggtgctgaaggtcgccccgctgggcggtatttcggcgctgcttgatatcgcggcgcggatcgccgttccggtggtggtctccagcgcgctcgattccgccgtcggaatcgccgccggcctgaccgccgccgcggccctgccggagctcgaccacgcgtgcgggctgggcaccggcgggctgtttgaagaggacgtggccgagcccgcagcacccgtcgacggctttctggcagttgcgcggacaacgcccgacccggcgcggttgcaagccctgggtgcaccgccgcagcggcgacagtggtggatcgaccgggtcaaggcctgctactcgttgcttgtaccgtctttcgggtga

SEQ ID NO: 778 - DNA, 726 bp, Tuberculosis
atgtcaactgtgttgacatatatcagggccgttgatatatatgaacacatgactgaatcgctggatcttgagttcgaatccgcctaccgcggtgaatccgtcgccttcggggagggagtccgaccgccatggagcatcggcgaaccccagcccgagctggccgccctgatcgtgcagggcaagttccgcggcgacgtcctcgacgtgggctgcggggaggccgcgatttcgctggcactggccgaacggggacacaccacggtcggactggacctctcccccgccgccgtagaactggctcggcatgaagcagcgaagcgcggcctggccaatgccagcttcgaggtggccgacgccagttcgtttaccggctatgacggcaggttcgacaccatcgtcgacagcacgctgttccactccatgccggtcgagtcccgggagggctatctgcaatcgatcgtgcgtgcggcggcaccgggcgcctcctacttcgtgttggtattcgaccgggcggcgatacccgaggggccgatcaatgcggtcaccgaggacgagctgcgcgcggcggtgtccaagtactggatcatcgatgagatcaagcccgcgcggctgtacgcgaggttcccggccggcttcgccggcatgcccgcactcctggacatccgcgaagagcccaacgggctgcagtcgatcggtggctggctgctctcggcccacctgggctga

SEQ ID NO: 779 - DNA, 687 bp, Tuberculosis
atgaagcacttcacggcggccgtcgcgacggtggcgctgagcctggcactggctggctgcagtttcaacatcaagaccgacagcgcgccaaccacgtcgccaaccacgacgtccccgacgacgtcgacaacgactacgtcggcaaccacctcggctcaggcagcggggcccaactacaccatcgccgactatatccgggacaaccacatccaggagaccccagtgcaccacggcgaccccggctccccgaccatcgacctgccggtgcccgacgattggcggctgcttccggaaagctcccgcgcaccctatggcggcatcgtctacacccagcccgccgatcccaacgatccccccaccatcgttgcgatcctctccaaactcaccggtgacatcgaccccgcgaaggtcctccaattcgcacccggcgagttgaaaaacctgcccggcttccaaggcagcggcgacggaagtgcagccacgctcggcggcttttcagcatggcagctcggtggttcatacagcaagaacggcaagttgcggaccgtcgcgcagaagacggtggtgattcccagccaaggtgcggtgttcgtgcttcaactcaacgccgacgcgctcgacgacgagacgatgacgttgatggacgccgccaacgtcatcgacgagcagacgaccatcacgccctaa

SEQ ID NO: 780 - DNA, 723 bp, Tuberculosis
atggcgctgcagccggtgactcgccgatcggtgcccgaagaggtcttcgagcagatcgctaccgatgtgctcaccggcgagatgccgcccggcgaggcgttgcccagcgagcgtcggttggctgagttgctcggagtgtcgcgacccgcggtccgcgaggcgctcaaacggctgtcggccgcaggtctggtcgaggtgcgtcagggcgacgtcaccaccgtgcgtgacttccggcggcacgccggcctggatctgttgccccgattgttgtttcgcaacggtgagctggatatctccgtcgtccgcagcatcctcgaggcccggctgcgcaattttccgaaggtcgcggaactagcggccgaacggaacgagcccgagttggcggaattgctgcaggattcgctgcgtgcgctggacactgaggaagatccgatcgtgtggcaacgccacacgctcgacttttgggatcatgtggtcgacagcgccggttcgatcgtagatcgattgatgtacaacgcatttcgtgctgcttacgagccgacgctagctgctctgaccaccacgatgaccgctgcggctaagcgtccgtcggactaccggaaactcgcggatgcgatctgctcaggtgatcccaccggagcgaagaaagccgcccaagacctactcgaacttgcgaacacatcgttgatggccgtactcgttagccaggcgagtcggcaatga

SEQ ID NO: 781 - DNA, 255 bp, Tuberculosis
ttgctgcacagcagcttcgggcacctcgagggcatccagcagccgctcatagacgagctggcagaactcgaccacgtgttgggcaagctgccggacgcctaccggatcatcggccgcgccggcggcatatacggtgacttcttcaacttctatctgtgtgacatctcactgaaagtcaacggattacagcctggaggtccggtacgcaccgtcaagttgttcggccagccgaccggcaggtgcacaccgcaatga

SEQ ID NO: 782 - DNA, 243 bp, Tuberculosis
gtgatggacgtattggctgctgggatcgcggctggcgcgctcacgctggcggcgtggggcgcctggcgcccgcactaccgggcggcgtcctacctcgtggccggtgccgtagagctggcactgatcgggctgctggtggtgaccgggcaaacattgatggccatctcggtggccttccttgtggcgctgggcggtccgttggtggtggtcaaccaccgcagagctgaacgcagccgaggttag

SEQ ID NO: 783 - DNA, 717 bp, Tuberculosis
gtgactaccttcgacggtgacacgtccgcgggtgaggcggtcgatctaacagaggccaacgccttccaggatgcagcggccccggctgaagaggtcgatccggccgccgcgctcaaagcggagctgcgcagcaagcccggcgactggtacgtcgttcactcctacgcagggtacgagaacaaggtcaaggccaacctggaaacccgggtgcagaaccttgatgtcggcgactacatcttccaggtggaggtgcccaccgaagaggtcaccgagatcaaaaacggccaacgcaagcaggtcaaccgtaaggtgctgcccggctacattctggtgcggatggacttgaccgacgactcctgggccgcggtgcgtaacacgccgggggtcacggggttcgttggggcaacatctcgcccgtcagcgctcgccctcgacgacgtggtgaagtttctgcttccgcgggggtcgacgaggaaggctgccaagggtgcggccagcacggctgccgccgccgaggcgggcgggctagagcgtccggtcgtcgaggtcgactacgaggtgggcgaatcggtaaccgtcatggacgggccgtttgccacattgccggccacgatcagcgaggtcaacgccgaacagcagaaactcaaggtgctggtctccatcttcggccgcgaaacaccggtggagctgacctttggccaagtctccaagatctag

SEQ ID NO: 784 - DNA, 861 bp, Tuberculosis
atggccaagctgagaccatattacgaagagtcacagtcggcttacgacatttcggatgacttcttcgcgttgttcctcgatcccacctgggtctacacctgcgcctatttcgagcgtgacgatatgacgctggaagaggcgcaactggccaaggtggatctggcgttggacaagctgaacctcgaaccggggatgacgctactcgacgtgggttgcgggtggggcggggcgctcgttcgggccgtggagaagtacgacgtcaatgtcatcggcctcacgctcagccggaatcactatgaacgcagcaaagaccgcctggccgcaatcggaacgcaacggcgcgccgaggcccggctgcagggctgggaagagtttgaagagaacgtcgaccggatcgtcagctttgaggcattcgacgcgttcaaaaaggagcggtatctgacgttcttcgaacgctcctacgacatcctgcccgatgacgggcggatgctactgcacagcctgttcacctacgaccgcaggtggctgcacgaacagggcattgcgctgacgatgagcgaccttcgattcctcaaattcctgcgggagtcgatcttcccgggcggcgagctgccatcggagcccgacattgtcgacaatgcgcaggccgcgggcttcaccatcgagcatgtccagctgctgcagcagcactacgcacggactctcgatgcatgggccgccaacctacaggctgcccgcgaacgcgccatcgccgtacagtccgaagaggtctacaacaacttcatgcactatctgaccggatgcgcggagcgcttccgcagaggcctaatcaacgtcgcccagttcaccatgaccaagtag

SEQ ID NO: 785 - DNA, 843 bp, Tuberculosis
atgctccgcagggtcgccatactgctcgccgctgtgcttgcgttcgcgggctgctcggggggaacgaggttggcggcgggcttcggcaatggcaatagcgtgcacaccctcgatgtcgatggagccggccgcagctaccggctttataagcccgtcgggttgccgtcctcggcgccgctggtcgtcatgttgcacggcgggttcggcagcgccaagcaagccgaaaggtcttatggctgggacgaattggccgactccgagaagttcctcgtcgcctaccccgatggctatcacagggcttggaatgccaatggcggaggctgctgcggccggcccgcacgtgaaggcgtcgacgacatcggcttcgtccgcgcggtcgtcgccgacatcgccaacaatgtcagcatcgaccccgcccgggtctacgtcacgggcatgagcaacggtgccatcatgtcctacacgctggcctgcaacaccagcatcttcgcggcgatcggcgtcgtttcgggcacgcaactagacccctgtcagtccccgcgtccggtgtcggtcatccacatccatggcacggccgatccgctggtccgctaccacggcgggcccggcgccgggttcgcgcgcatcgacggtccgccggtgcccgatctcaatgcgttctggcgcgaggtcaaccggtgcggcgcgctggataccacgaccgaaggtccggtcaccacatcgggcgccacatgcgccgacaatcgccgtgtcgtgctgctcaccgtcgatgacgccggccaccgatggccgtcatttgccacccagacactgtggcgattctttgcagcgcacttcagatga

SEQ ID NO: 786 - DNA, 657 bp, Tuberculosis
atgaacttcgttgacgccccggaatccgcggtgctggcggccgccaaggacatgttgcgtcggggcctggtcgaggggaccgccggaaatatctcagccaggcgctcggacggcaacgtggtcatcacgccgtcctcggtcgactacgccgagatgctgctccacgatctggtgctagtcgacgccggcggtgcggtgctgcacgccaaggacggccggtcgccgtcgaccgaactaaacctacacctggcgtgctatcgcgcattcgacgacattggcagcgtgatccacagccacccggtgtgggcgaccatgttcgccgtcgcccatgagccgattcccgcctgcatcgacgagttcgcgatctactgcggcggggacgttcgctgcaccgagtacgccgcgtccggtacacccgaggtcggccgcaacgcggtgcgcgcgcttgagggccgcgccgccgccctgatcgccaaccacggcctggtggccgtggggccccgccccgaccaggtgctgcgcgtcaccgcccttgttgagcgcaccgcacaaatcgtttggggtgcccgcgctctcggtggaccggtgccaattcctgaggacgtgtgccgtaacttcacgggcgtctacggctatctgcgcgcgaatccgctctag

SEQ ID NO: 787 - DNA, 546 bp, Tuberculosis
gtgagagttttgttgctgggaccgcccggggcgggcaaggggacgcaggcggtgaagctggccgagaagctcgggatcccgcagatctccaccggcgaactcttccggcgcaacatcgaagagggcaccaagctcggcgtggaagccaaacgctacttggatgccggtgacttggtgccgtccgacttgaccaatgaactcgtcgacgaccggctgaacaatccggacgcggccaacggattcatcttggatggctatccacgctcggtcgagcaggccaaggcgcttcacgagatgctcgaacgccgggggaccgacatcgacgcggtgctggagtttcgtgtgtccgaggaggtgttgttggagcgactcaaggggcgtggccgcgccgacgacaccgacgacgtcatcctcaaccggatgaaggtctaccgcgacgagaccgcgccgctgctggagtactaccgcgaccaattgaagaccgtcgacgccgtcggcaccatggacgaggtgttcgcccgtgcgttgcgggctctgggaaagtag

SEQ ID NO: 788 - DNA, 801 bp, Tuberculosis
atgcgcccactggcacggctgcggggtcgcagggtcgtgccgcagcgcagtgccggcgaactcgacgcgatggccgcggcgggcgccgtcgttgccgccgcgctgcgggcgatccgtgcggcagcggctcccggcacatccagcctgagtctcgacgagatcgccgagtcggtgatccgcgaatccggcgccaccccgtcgtttctgggctatcacggctacccggcctcgatctgcgcgtcgatcaacgaccgggtggttcatggcatcccgtcgaccgccgaggtgctcgcgcccggtgatctggtatccatcgactgcggtgcggtgctggacggttggcatggcgatgcggcgatcactttcggggttggcgccctgagcgacgccgacgaagcgctgtcggaggcgacaagggaatcgcttcaggccggcatcgccgcgatggtggtcggcaatcggttgaccgacgtcgcgcatgccatcgaaacgggtacccgtgccgccgagctccgttatggacgctcgttcgggatcgtcgccggttacgggggccacggcatcggccgccagatgcatatggatccgttcttgccgaacgagggtgcgccggggcgcggtccgctgctggctgccggctcggtgctggccatcgaaccgatgctgaccctcggtaccaccaaaacggtggtgctcgacgacaaatggacggtcacgaccgccgatgggtcacgtgcggcacactgggaacacaccgtggcggtaaccgacgacgggccccgaattctgacgctcggttag

SEQ ID NO: 789 - DNA, 753 bp, Tuberculosis
atgacgatgccgctacgaggacttggcccgcccgatgacaccggtgtgcgcgaggtgtcgacgggtgatgatcaccactacgcgatgtgggatgcagcttacgtgttgggagcattgtctgcggccgaccgccgcgaattcgaagcgcacctggccggttgccccgaatgccggggggccgtcaccgaactctgcggggtgcccgccctgctgtcccagctcgatcgtgacgaagtggccgcgattagcgaatccgccccgactgtggtggcttcggggctgtcgccggagttgttgccgtcgttgctggcggcggtgcacaggcgtcggcgccgtacccggctgatcacctgggtggcctcgtccgccgctgccgcggtgctggcgatcggtgtgctagtcggtgtgcagggccactccgcggcaccgcagcgggcggccgtgtcggcgctgccgatggcccaggtcggcacgcagctgttggcgtccacggtgtcgatcagcggcgagccttgggggacgttcatcaacctgcggtgcgtctgcctggcgccgccgtatgcttcccacgacacgctggccatggttgtggtgggtcgtgacggcagccagacacggctggcgacttggttggccgaacccggtcacaccgcgacacccgccggcagcatttcgacaccggttgaccagatcgccgccgtgcaagtggttgccgccgataccggccaggttctgctgcagcgttcgctctaa

SEQ ID NO: 790 - DNA, 549 bp, Tuberculosis
gtggacccactgatggctcaccagcgcgctcaggacgcgttcgccgcgctcctggccaacgtccgcgctgaccagctcggcggccccacgccctgctcggagtggacgatcaacgatctgatcgagcacgtcgtcggcggcaacgagcaggtcgggcgatgggcggccagccccatcgagccacccgcccggcccgatggcctcgttgccgcccaccaagccgcggccgcggtcgcccacgagatcttcgcggcgccgggcgggatgtccgccacattcaagctgccgttgggcgaggttcccgggcaggtgttcatcgggttacgcaccaccgatgtgctgacccacgcgtgggatcttgccgccgccaccggccaatccaccgatcttgatcccgagttggccgtcgagcggctcgccgccgcgcgtgccttggtggggccgcagttccgcgggccgggaaagcccttcgcggacgagaagccttgcccgcgtgagcgcccgcccgccgatcagctggcggcatttttgggccgcacggtgcggtga

SEQ ID NO: 791 - DNA, 528 bp, Tuberculosis
atatcgtttgtgatcgcggcgccggaggccatcgcggcagcggccacggatttggcaagcatcggttcgacgatcggggcggccaacgccgcggccgcggccaacacgacggcggtgctggccgcgggcgccgatcaggtgtcggtggccatcgcggcggcttttggggcgcacggccaggcctatcaggcgctcagcgcgcaggcggcgacgtttcatatccagtttgtgcaggccttgaccgcgggcgcgggctcgtatgcggccgccgaggccgccagcgccgcgtccataaccagtccgctgctcgacgcgatcaacgcgcccttcctggcggcgttggggcgcccgctgatcggtaacggcgccgacggggcgccggggaccggggccgccggcggggccggcggattgttgttcggcaacggcggcgcgggcgggtccggcgcgcccggcggggccggcggattgttgttcggcaacggcggcgccggcggccccggcgcgtccggcggcgcgctgggctga

SEQ ID NO: 792 - DNA, 747 bp, Tuberculosis
atgttcgacagcaaggtggctatcgtcaccggggctgcccagggtatcgggcaggcctacgctcaggcgttggcccgcgaaggtgcctcggtggtcgtcgctgacatcaacgccgacggtgccgcggcggtagccaagcagattgtcgccgacggcggtactgcgattcatgtgcccgttgacgtgtccgacgaggattccgctaaagccatggtcgaccgcgccgtcggtgctttcggcggcatcgactatctggtgaacaatgcggcgatctacggtggcatgaagctcgatctgttgttgaccgtgccgttggactactacaagaaattcatgagcgtcaaccacgacggcgtgctggtgtgtacccgcgcggtgtacaagcacatggccaaacggggcggcggcgcgattgtcaaccagtcctcgaccgcggcctggctgtattccaacttctacggcctggccaaggtcggtgtcaacgggctgacgcagcagctggcccgcgagctgggcggaatgaagataaggatcaatgcgatcgcacccggaccgatcgacaccgaagctacccgcaccgtcacccccgcagagctggtcaagaacatggtgcagaccatcccgctgtcgcggatgggtacaccggaggatctggtgggcatgtgcctgttcctgctgtcggattcggcatcgtggatcaccgggcagatcttcaatgtcgatggcggacagatcatccggtcatga

SEQ ID NO: 793 - DNA, 306 bp, Tuberculosis
atgacgtcacccgtcgcggtcatcgcccggttcatgccacggcctgacgctaggtcggccctgcgcgctctcttggacgcaatgattaccccgacacgggccgaggacggatgccgtagctacgacctctacgagagcgccgacggcggcgagctggtgcttttcgaacggtaccgcagccgcatcgcgctcgacgagcaccgcggttcgccgcactatctgaactaccgggcacaggtcggtgaattgctgacccggcccgtcgcggtgactgtgctcgcgccgctcgacgaggcttctgcttag

SEQ ID NO: 794 - DNA, 834 bp, Tuberculosis
atggcacgctgcgatgtcctggtctccgccgactgggctgagagcaatctgcacgcgccgaaggtcgttttcgtcgaagtggacgaggacaccagtgcatatgaccgtgaccatattgccggcgcgatcaagttggactggcgcaccgacctgcaggatccggtcaaacgtgacttcgtcgacgcccagcaattctccaagctgctgtccgagcgtggcatcgccaacgaggacacggtgatcctgtacggcggcaacaacaattggttcgccgcctacgcgtactggtatttcaagctctacggccatgagaaggtcaagttgctcgacggcggccgcaagaagtgggagctcgacggacgcccgctgtccagcgacccggtcagccggccggtgacctcctacaccgcctccccgccggataacacgattcgggcattccgcgacgaggtcctggcggccatcaacgtcaagaacctcatcgacgtgcgctctcccgacgagttctccggcaagatcctggcccccgcgcacctgccgcaggaacaaagccagcggcccggacacattcctggtgccatcaacgtgccgtggagcagggccgccaacgaggacggcaccttcaagtccgatgaggagttggccaagctttacgccgacgccggcctagacaacagcaaggaaacgattgcctactgccgaatcggggaacggtcctcgcacacctggttcgtgttgcgggaattactcggacaccaaaacgtcaagaactacgacggcagttggacagaatacggctccctggtgggcgccccgatcgagttgggaagctga

SEQ ID NO: 795 - DNA, 423 bp, Tuberculosis
atgccggcaggcatggcaggttttcgacgatgggcccaaaccaatgatccgaccgcccacgccgagagccttgccatccgtgccgcgtgcaccaagctgggcactgagcacctggtcggtaccactctcaacgtgctggcccatccgtgtccgatgtgctatggatcgctgtactactgctcacccgatgaggttgtcttcctgacgtcgcgtgacgcctatgaaccgcattacgtcgatgaccgcaggtacttcgagcccgccaccttctacgacgagttcgccaaggaatggcaggaccggcgcctgccgatgcgccaagagcaccggcccgatatcagggctggcgcggtggatgtctaccggttccggcaggaacccaacggcggtgagcgcagcgcgatcgccgctccgacgggctga

SEQ ID NO: 796 - DNA, 861 bp, Tuberculosis
gtggaggggacaatcgcggtcccgggtggacgcgtctggttccagcggattggtggcggtcctggtcgtccgctgcttgtagtgcacggtgggccgggcttgccgcacaactacttggccccactgcgacggttgtctgatgagcgggaggtcatcttctgggaccagctcggttgcggaaattccgcatgtccgtcagacgtagacctttggacgatgaaccgctcagtggccgagatggcaaccgtggcggaagcccttgcccttacccgctttcacatcttcagccattcgtggggtgggatgctggcacagcagtacgtgctcgacaaggcgcctgacgccgtcagtctgaccatcgcgaacagcacggcttcgatacccgaattttcggccagtctggtcagcttgaagtcgtgcttggacgtggcaactcgctcggcaattgaccgtcacgaggcggccggcaccacccattccgccgaataccaggccgcgatcagaacctggaacgagacttatctgtgccgcacccgcccctggccccgggaactcacggaagcattcgccaacatgggaaccgagatcttcgagacgatgtttgggcccagcgactttcgcatcgttgggaatgttcgagactgggacgtcgtcgaccggttggccgacatcgcggtgccgaccttgctggtggtgggccgtttcgacgaatgttcgcctgagcacatgcgagaaatgcagggccggattgcgggctcgcgattggaattcttcgagtccagttcccacatgccgttcatcgaagagccggcgcgattcgaccgggtgatgcgtgaattccttcggctgcacgatatttga

SEQ ID NO: 797 - DNA, 867 bp, Tuberculosis
gtgaccgaaggccgttgtgcccagcaccccgacggcctcgatgttcaggacgtctgcgatcccgacgacccacggctcgacgatttccgtgacctgaacagcatcgaccgtcgtcccgatctgccgaccggcaaggcgttggtgatcgccgagggtgtgctggtggtgcagcgcatgctggcctcacggttcacgccgctggcgctgttcggcaccgaccgccggctggccgagctcaaggatgatctggccggtgtcggcgcgccgtactatcgagcgtcggctgatgtcatggcacgggtgatcggcttccatctcaatcgtggggtgttggcagccgcgggccgggtgccggagccgagcgttgctcaggtggtcgccggggcgcgcaccgtcgcagtgttggaaggcgttaacgaccatgagaacctgggctcgatcttccgcaacgcggcagggctgagcgtggacgcggtagtgttcggcaccggctgcgctgatccgctctaccgtcgtgcggtccgggtatccatgggacacgcgttattggtgccatatgcacgcgcggccgactggcccaccgaacttatgacgttgaaagagagcggctttcgactgttggcgatgaccccacacggcaacgcgtgcaaactaccggaggccatcgccgcggtgtcgcacgaacggattgcgctactggtgggcgcggagggcccgggcctaacggcggccgcactgcggattagcgatgtgcgggtgcgcattccgatgtcccgagggaccgactccctcaacgtcgcgacggcggccgcattggctttctacgagcggactaggtcgggccatcacattgggcccggcacgtga

SEQ ID NO: 798 - DNA, 1125 bp, Tuberculosis
gtgaaaattcgtttgcatacgctgttggccgtgttgaccgctgcgccgctgctgctagcagcggcgggctgtggctcgaaaccaccgagcggttcgcctgaaacgggcgccggcgccggtactgtcgcgactacccccgcgtcgtcgccggtgacgttggcggagaccggtagcacgctgctctacccgctgttcaacctgtggggtccggcctttcacgagaggtatccgaacgtcacgatcaccgctcagggcaccggttctggtgccgggatcgcgcaggccgccgccgggacggtcaacattggggcctccgacgcctatctgtcggaaggtgatatggccgcgcacaaggggctgatgaacatcgcgctagccatctccgctcagcaggtcaactacaacctgcccggagtgagcgagcacctcaagctgaacggaaaagtcctggcggccatgtaccagggcaccatcaaaacctgggacgacccgcagatcgctgcgctcaaccccggcgtgaacctgcccggcaccgcggtagttccgctgcaccgctccgacgggtccggtgacaccttcttgttcacccagtacctgtccaagcaagatcccgagggctggggcaagtcgcccggcttcggcaccaccgtcgacttcccggcggtgccgggtgcgctgggtgagaacggcaacggcggcatggtgaccggttgcgccgagacaccgggctgcgtggcctatatcggcatcagcttcctcgaccaggccagtcaacggggactcggcgaggcccaactaggcaatagctctggcaatttcttgttgcccgacgcgcaaagcattcaggccgcggcggctggcttcgcatcgaaaaccccggcgaaccaggcgatttcgatgatcgacgggcccgccccggacggctacccgatcatcaactacgagtacgccatcgtcaacaaccggcaaaaggacgccgccaccgcgcagaccttgcaggcatttctgcactgggcgatcaccgacggcaacaaggcctcgttcctcgaccaggttcatttccagccgctgccgcccgcggtggtgaagttgtctgacgcgttgatcgcgacgatttccagctag

SEQ ID NO: 799 - DNA, 849 bp, Tuberculosis
atgcactacggacttgtgctgttcaccagcgaccgcggcatcaccccggccgcggccgccagacttgctgaaagccacgggtttcgcacgttttacgtgcccgaacacacccacatcccggtcaagcgccaggcggcccatccgacgacgggtgacgcttcgctgccggacgaccgctatatgcgcacgttggacccgtgggtgagcctgggagcagcatcggcggtgacgtcgcggatccggcttgccaccgcggtggcgctgccggtcgagcatgatccgatcacgctggcgaaaagcattgcgacgctggatcatttgtcgcacggccgggtcagcgtcggggtcgggttcggctggaacaccgacgagctcgtcgatcatggtgtgccacccggacgccgccgcaccatgctgcgcgaatacctcgaggcgatgcgggcgttgtggacccaagaggaggcctgctatgacggcgagttcgtcaagttcggacctagctgggcctggcccaagccggtgcagccgcacatcccggtgctggtaggcgctgcggggacggagaagaacttcaagtggatcgcgcgcagcgccgacggctggatcaccactccacgcgacgtcgacatcgacgagccggtgaagttactgcaagacatctgggcggccgccggccgcgacgggcttccacagatcgtggccctggacgtcaaaccggtgcccgacaagctggcgcgctgggccgagcttggcgttacggaggtgctgttcggtatgccggacaggtctgcagacgacgcagccgcgtacgtggagcggctggccgccaagttggcctgttgcgtatag

SEQ ID NO: 800 - DNA, 732 bp, Tuberculosis
gtgtcgccgagacgctggttgcgggcggtcgccgtgataggggcgaccgcgatgctgttggcgtcgagctgcacttggcagctgagccttttcatcaccgacggcgtgccgcctccgcccggcgatccggtgccgccggtggatacgcacgccggcggccggcccgcggatcagttgcgcgaatgggcggagaaacgtgctgcggcattgggaattccggtcatcgcgctggaggcctacgcctacgccgctcgcgtcgccgaggtcgagaatcccaagtgtcatcttgcgtggaccacgctggcgggcatcgggcgggtggagagtcaccacggaacctaccggggcgccacgattgcgcccaatggggatgtaagccccccgattcggggcgtccgcctcgacggcaccggcggcaccctgcgcatcgtggacagggacgggggcggcctggacggtgacgccgcggtggagcgtgcgatggggccaatgcagttcatttcggaaacctggcggttgtacggggtcgctgccagaaacgacggcatcgccaacgtcgacaacatcgatgatgctgccctctcggcagcgggctatttatgctggcgtggaaaggatctcgcgacaccgcgagggtggataaccgcgctgagggcctacaacaactccgttatctatgcgcgggcggtccgggactgggcgaccgcgtatgcggcgggtcatccgctgtag

SEQ ID NO: 801 - DNA, 864 bp, Tuberculosis
atgagggcaagcccggcagacggtttagcgatcaccggcttatcctggaagggatcgcgtggcggttccgtacgggaagtccgtggcgggacctgcccgctgagttcgggccgtggcaaacggtgtggaagcgccatcaccgttggtcgctggatggtacctgcgacgaggtgttcgcccacgttgccgcggtgttcggggtggacgctgaggtggccgaggatatcgagaagctgctgtcggtggattccacgaacgtgcgggcacaccagcattcggcgggcgcctgctcggacacgctcgccacagggggcactgtcggattacaagaaatccgccgatgaacccgacgatcatgcgatcggccgctcgcgcggcgggctgaccaccaagatccatgccctgaccgatcagcgcgaagccccggtgcggatccggttgaccgcaggccaggccggcgacaacccgcaactgctgcccctgctcgacgactatcgccatgccagcaccgaatacgccctgggcagcacggatttccgcttactcgccgacaaggcctactcacacccaagtacccgtgccgcattacggtctaagaagatcaagcacaccatccccgaacgccaagatcagatcgaccggcgcaaggccaaggggtctgccggcgggcggccaccagcattcgacgccgcgctctacgggctacgcaacaccgtcgaacgcggcttccatcgactcaagcagtggcgcggcatcgcaacccgctacgacaaatacgccctgacctacctcggcggcgtcctgctggcctgcgccgtcatccacgcccgagtgggaactccgaaattgggagacacgccctag

SEQ ID NO: 802 - DNA, 756 bp, Tuberculosis
atgcgcgccgacgtcaccgccgagcatctcacccaggtggttcgcgacatcgccgtgatcgacatcgacgacggggtggcgttcaacctcgacacgagcagcgtgcaggaaattcgcgagcgggccgactacccgggcctgcgcgtgcgagtcgctatgtcggtcggaccgtggcagggcatcgcggcctgggatgtgtccaccggcgaaccgatcgcgccgtggcccacacgggtgaccatcgaccggatcctcggcgagccgatcacactcctgggctacgcgcccgagaccatcatcgccgagaagggagtgaccatcctcgaacgcggcatcaccagcacccgctggcgggactacgtcgacatcgtccaactcgaccgccggggcatcgacgacgacgagctgctccgctcggccagggcagtcgcacaataccgcggcgccactctcgaacccgtcgcgcctcacctggccggttatggcgcagtcgcgcaagcgaaatgggcgaccgaacacggacgctgccagcactgttggagacattggaaaccagcccatgtcgggaggagaaacatggatctgctggacgcaaaacaagtttcggagatgatcggcgttcccgtcggcactctacggcactggcggcactcggacatcggaccggcgagcttcaccttgggacggcgcgtcgtgtaccggcgcgacgaggtgtcgcgctggatctcaaagcgggagagcgcaactcgacgttga

SEQ ID NO: 803 - DNA, 765 bp, Tuberculosis
atgagcgtggattacccccaaatggctgctacccggggaagaatagaaccggccccgcggcgagttcgcggctatctcggacatgtgctcgtcttcgacaccagtgcggcgcgctatgtctgggaggttccctactacccgcagtactacatcccgctggcggatgtccgcatggagttcctgcgcgacgagaaccacccgcagcgagtgcagctgggtccgtcgcggctgcactccttggtaagcgccggtcagacccaccgatcggcggcgcgggtattcgatgtcgacggcgacagcccggtggcgggcaccgtgcgtttcaactgggatccgctgcggtggttcgaggaggacgagccgatctacggccatccgcgcaatccctatcagcgggccgatgcgctgcgctcgcaccgacacgtccgtgtcgagctggacggcattgtgctcgctgacacccgatcgcccgttctgctattcgaaactgggatacccacaaggtattacatcgatccggccgacatcgctttcgagcatctggagcccacctcgacgcagacgttgtgtccgtacaaggggacgacgtcgggctattggtctgtgcgcgtcggcgacgccgtgcaccgcgacctggcctggacgtatcactatccactgcccgccgttgccccgatcgccggcctggtggcgttttacaacgagaaggtcgacctcaccgtcgacggcgtcgccctgccgcggccgcacactcagttcagctag

SEQ ID NO: 804 - DNA, 2004 bp, Tuberculosis
gtgtcgtttgtgttggtgtctccgtcgcagctgatggccgcggcggccgatgtggccggtatcggttcggcaatcagcgcggccaacgcggccgccctggccccgacgtcggtgctggccgcggccggtgccgatgaggtgtccgcggcggtcgcggcactgttttccgcccacgccggccagtatcaacagctgggcgcgcgtgcagcgctgtttcacgagcagttcgtgcaggcattgaccggggcggcgagcgcgtatgccagcgccgaggcgaccaatgtcgagcagcaggtgctgggtttgatcaacgcgcccacccaggcgctgttggggcgtccgctgatcggcaacggcgccgatgggaccgcggccaatcccaacggtggcgccggtgggttgttgtacggcaacggcggcaacgggttttcccaaaccaccgccgggctcaccgggggtaccggcgggtcggccgggttgatcggcaacggcggcaacggaggggccggcggagccggcgccaacggcggcgcgggcggcaacggcggctggctctacggcagcggcggcaatggcggcgccggcggcgccggccccgccggagccatcggcgcgccgggcgtcgcgggtggtgccggcggggccgggggaacggccggattgttcggcaacggcggtgtcggcggcgtcggcggtgacggcggacaaggcggcaacggtgccggcgccggggccagcggcaccaagggcggtgacgccggcgccggcggggcgggcggtgccggcggctggatccacggccacggcggcgccggcggtgacggcggcgccggcggggccggcggacaagccagtcccggcgcccccggcccacccagccaaccgggcggcgccggtggtgcgggcggcgccggtggccgcggtggcgacggcgggtcggccggctggctgtccggcaacggcggtgacgccggcaacggcggcggcggcggcaccgccggcggtgccggcaacggcggccaattcggtggagacggcggcaccggcggcaccggcggcaccgccggcgccggcggcaacggcggacgaggcgccgtgctgttcggtcacggaggtaacgccgggcacggcggcgccggcggcaacggcgcggccgccggcgccggcggcgaacatgtcgtggccaccgccggtaagggtggtacgggtggtgtcggcggcgacggcggcggcggcggcgccggtggtggcggtgggctgctgtatggcaacggcggggccggcggcgccggcaactccgggggcgacggcggcaccgggctcaacgccgcactaggtggtaacggtggcggtggcggtgtcggcggcaacgccggggccggcggcaccggcgggtcggccggctggctgtcgggcaacggcggcgccggcggtagcggcggcagcgccggagccggcggcgccggcggaaagggcggcgacacccccaacggtctggccatcaatcccggtatcggcggcaacggcggggacaccggcaacgccggcaacggcggcaacggcggatcggccgccaggctgttcggtggcggcggcgccggcggcgccggcggaacgggcagcaccgccggcagcggcggcagcggcggcaccaacccgccgaccgggcttcaagccgccggcggtaacggcggcagcggtcacgcgggcggtcacggcggcaacggcggcggcgccggcctgctcggcggcggcggcaccggcggcaacggcgggggcggcggccaaggcggtctgggcgccgccgccggcggtgtcgacggcaacggcggcaacggcggcaacggcggcaagggcggcgacgcccagttggtcggtgacggcggcaacggcggcaacggcggcaagggtggcgccggcctgatcgccggactcgacggcgccggcggcgccggcggaactcgaggactcatcttcggcaacgccggcacgccggggcagtaa

SEQ ID NO: 805 - DNA, 867 bp, Tuberculosis
gtgagcgaactgcggttgatggcggtgcacgcccaccccgatgacgagtccagcaagggcgcggccaccctggcgcgctacgccgacgagggtcatcgcgtgctggtggtgacgttgaccggtggtgagcgcggcgagatcctcaacccggcgatggacctgccggacgtgcatgggcgcatcgccgagatccggcgtgacgagatgaccaaggcggccgagatcctcggtgtcgagcacacctggctgggcttcgtcgactccgggctacctaagggtgatttaccgccaccgctgcctgatgactgcttcgcgcgggtaccgctggaggtgtccaccgaggcgctggtgcgggtggttcgcgagtttcggccgcacgtgatgaccacctacgacgagaacggcggctacccacatcccgaccacattcgctgccatcaggtttcggtggctgcctacgaggcggccggtgacttttgccggtttcccgacgcgggtgagccgtggacggtgtccaagctgtactacgtccacggcttcctgcgggagcggatgcagatgttgcaggatgagttcgcccggcacggccaacgcggcccattcgaacaatggctggcgtactgggaccccgaccatgactttctcaccagccgagtgaccacccgggtcgagtgctcgaaatacttcagccaacgcgacgatgcgttgcgcgcgcatgccacccagatcgacccgaacgccgaattcttcgccgccccgcttgcctggcaggagcggctgtggccgaccgaggaattcgagttggctcgctcgcgtatccccgcgcgcccaccggagaccgaattgttcgccgggatcgagccgtga

SEQ ID NO: 806 - DNA, 987 bp, Tuberculosis
atggagctggtccgggtgaccgaggccggagccatggccgcgggccgctgggtaggccgcggcgacaaggagggcggcgacggcgcggcggtcgacgcgatgcgcgaactggtcaactcggtttccatgcgcggggtggtggtcatcggcgaaggcgaaaaggaccacgcaccaatgctctacaacggcgaagaagtgggcaacggcgacggaccggaatgcgactttgccgtcgaccccattgacggcaccacgctgatgagcaagggcatgaccaacgccatctcggtgctggcggtagccgatcgcggcaccatgttcgacccgtcggcggtgttctacatgaacaaaatcgccgtcggccccgatgccgcacacgtgctggatatcaccgcgccgatctcggaaaacatccgagcggtcgccaaggtcaaggacctgtcggtgcgagacatgacggtgtgcatcctggacaggccgcggcacgcgcaactcatccacgacgtccgcgccaccggggcccggatccggctgatcaccgatggcgacgtcgccggcgcgatctcggcgtgccgaccgcactccggcaccgacctgctagctgggatcggcggcaccccggagggaatcatcgccgccgcggcgatccgctgcatgggcggggcgatccaggcgcagctcgccccgcgcgacgacgcggaacgccgcaaggccctagaagccggttacgacctgaaccaggtcttgaccaccgaagatctggtgtccggggaaaacgtcttcttctgcgccactggggtcaccgacggcgacctgctcaagggagtgcgttactaccccggcggctgcaccacccattcgatcgtgatgcgctcgaagtccggcaccgtccggatgatcgaggcctaccaccggctttcaaagctcaacgaatactccgcgatcgacttcaccggcgacagcagcgccgtgtacccattgccctaa

SEQ ID NO: 807 - DNA, 321 bp, Tuberculosis
atgtacctaccctggggggtcgtcctcgccggcggcgcgaacggttttggggcgggtgcataccaaactggtaccatctgtgaagtgagtacacagattgcggttcgcttgcccgatgagattgtcgcgttcatcgacgacgaagtccggggacagcatgcccgtagccgtgcggctgtcgtgctgcgggcgctggaacgggaacgccgccgtcgtctcgccgaacgcgacgcggagatcctcgccaccaacacgtcagccacgggtgatctggatacgctggccggccactgcgctcgtaccgccctcgacatcgactga

SEQ ID NO: 808 - DNA, 861 bp, Tuberculosis
gtgcaatcgggcccgcacctcgtcgggcgtgtaggcacgtcgtttccgttgatcgcgcgccaccagggcgccacccgcgacgacgccggcgacaccggccagcccgacccacttccacacgttgcgcaccccgacaggctatatccgcctatggtgcatggggtggacccgagcacgctagcgctggatcgagcgctgaacgaaacccgcaccggcgacctctggctgtttcgcggccgttcccgacccgaccgggcgatccagaccttgacgaacgccccggtgaaccacgtcggcatgacggtggccatcgacgacttgccgccgctgatctggcatgccgaactgggcgacaagctgctcgacgtatggaccggcaccaaccaccgcggcgtgcagctcaacgacgcccgccaagtcgtgcagcagtgggccggccgttatcggcagcggtgctggctgcgtcaactgacaccgcacgccaatcgcgaccaggaggacaaactgctgcgggtcatcgcgcggatgaacggcacgcctttcccaaccaccgcccggttgaccggccggtggctgcgcggccggcttccgaccctcaacgattggctgcgcggcataccggtgctggaccgcaaggtgcgcgaacaaacccagcgacgtaagcaacagcagcgcacgatgggcctggcgacggcatattgcgcggagacggtggccatcacctatgaggaaatgggattgctggtcaccgacaaggacgcgcactggttcgaccccggcaagttctggagcggtgactcgctgcccctggcgccgggttatcggctgggtcacgaaatcgcggtcgacgtgggcggctga

SEQ ID NO: 809 - DNA, 366 bp, Tuberculosis
gtggagctgcgggattggttacgggtcgacgtgaaggcgggaaagccgttgttcgaccagctcagaacccaggtgatcgacggagtccgcgccggcgcattgccgcccggcacccggctcccgacggtgcgtgacttggccgggcagctgggcgtggcggccaataccgtggcccgcgcctaccgcgagttggaatcggcggcgatcgtcgaaacgcggggacgcttcggcactttcatttcccgcttcgatccgaccgacgccgcgatggctgccgcggccaaggaatatgtcggcgtggcgcgagcgctggggctgacgaagtccgatgcgatgcgctatctcacccacgtgccggacgactga

SEQ ID NO: 810 - DNA, 642 bp, Tuberculosis
atggagtttccactgattacggccaacagcttgtcgtcgaagacttggcgggccatgccaagagcctacgtcgccgttgcgtcattctccggcggcctggtgcaatcgggtatggccaagttcgcggcgtttctgcgcggtgtcaacgtcggcggcgtcaacctcaagatggccgaggtggcgacggcgttgaccgatgcgggattctgcaatgtgcgcaccatcctggccagcggcaacgtgttgctggagtcgacgtgcggtgccgcggaagtgcgcgagaagaccgaagccacgctacgcgaacgattcggctacgacgcgtgggcgttgatctacgacgtcgatacggtgcgcaccatcgtgacggcatacccatttgaatgcgagctcgagggataccagtcgtacgtcaccttcgttgccgacgccgcgatactcgacgagctatccgcactcgccgacacagccggccctgacgagaacatcagtcgtggacccgaccctcttggcgtcctctactggcaggtacccaagggcagcaccctggacagcaccatcggccagacgatgggcaagaagcgctacaagtcgtcgaccacgacccgcaacctgcgcacgctggctaaggtgttgcggtga

SEQ ID NO: 811 - DNA, 1116 bp, Tuberculosis
gtgagaaggctgaccaacaccgaacaccgggagaacaccaccgtggcaagcacttggagtgtgtgcaaaggtttggccgccgtcgtcatcacctcggctgccgcgttcgcgctgtgtccgaacgcggcagccgacccggcgacgccgcagcccaaccccactcaacagctaccgggcttgccggcgttggcccagctgagtccgataatccagcaagcggcgatgaacccggcacaggcgacgcaactgctcatggccgcagcgtctgcgttcgccggcaatccggcagtgcccaccgaatccaagaacgtcgcttcctcggtgaaccagtttgtggctgagccgaccaatcccgactctgctgccctgggtgtgccggcgcctcatggtgtcgccctgcccgaggccatcccggtgccgcatgtgcccccactgggcgccgagccaggtgtgcaggcacatcttccgaccggcatcgatccatcccacgccgcgggccccgcacccgctgtggcacctacggttacgccgccggtcgccgcgccgccggcttccgcgccggcaccagcacctgacgcagcccaaccggttgcggtaccggggccgccaccggcgccacctgcgccgcgcgccgccgctccggcgccggcctcggcggcaccggcgccagcggccgctccggcgcctgcctcgggcttcggcgccgacgctccgcccacacaggacttcatgtacccctcgatcggccccaattgtgtggcggacggcagcaattccatcgcgaccgcgctgtcggtggcggggcccgccaagatcccgctgcccggtcccggacccggccagaccgcctacgtgttcacggccgtcggcacgccggggcccgccgacgtgcagaggttgccgctgaacgtcacgtgggtgaacctgaccacgggaaagtccggcagcgccaccctgcggccgcgttcggacatcaatccggacggaccgaccacgttgaccgtaatcgccgacaccggttcaggcagcatcatgtcaacgatcttcgggcaggtgaccaccaaggaccggcagtgccagttcatgccgacgatcggctcaacggtggtgccctag

SEQ ID NO: 812 - DNA, 426 bp, Tuberculosis
atgctgaatcagatcgtggttgccggagccatcgtccgcggttgcacggtcttggtggcgcaacgcgttcggccaccggagttggcgggtcgttgggaacttcccggcggtaaggtcgccgccggcgaaaccgagcgcgccgcgctggcccgagagctcgccgaagaactgggactcgaggtcgccgacctcgcggtgggcgaccgtgtgggcgacgatattgcgttgaacggcacgacgacgctgcgggcctatcgcgtgcatctgcttggcggcgaaccgcgtgcgcgtgaccaccgggcgctgtgctgggtgacggcggccgaactgcacgatgtcgactgggtaccagccgaccgcggctggattgcggacctggcgcgaaccctcaacgggtccgccgcagatgtccaccgtcgctgttag

SEQ ID NO: 813 - DNA, 873 bp, Tuberculosis
atgtcgcaacacgacccggtaagtgcggcctggcgggcgcatcgggcctacctggtggacctcgcgtttcgtatggtaggtgacatcggcgtggccgaagacatggtgcaagaggcattttcccgcttgctgcgggctccggtcggcgacatcgacgacgagcgtggctggctgatcgtggtcaccagccggctgtgcctggatcacatcaagtcggcgtcgacacgccgggagcgcccgcaggacatcgccgcatggcacgacggtgacgccagcgtgtcatcggttgacccggctgaccgggtgactctcgacgacgaggtccggctggctttgctgatcatgctcgagcgcctcggccccgcggagcgggtggtgttcgtgctgcacgagatctttgggctgccctaccagcaaatcgccacgacgattggcagccaggcctccacatgccggcagctggctcatcgggcccgtcgcaagatcaacgaatcgcgcattgcggccagcgtggagccagcccagcatcgcgtcgtcaccagagctttcatcgaagcctgctccaacggagacctggacaccctgctcgaggtgctggatccgggtgtcgccggcgagatcgacgcccgcaaaggcgttgtcgtcgtgggcgcggatcgggttggcccgaccatcctgcgccactggagtcaccccgccaccgtcctggtagcccagccggtgtgcggtcaaccggcggtgctggcctttgtcaaccgagcgcttgccggcgtgttggccctgtcgatcgaggccggcaagatcacaaaaatccatgtcttagtgcagccttcaacattggacccgttacgggccgaactcggcggcggttag

SEQ ID NO: 814 - DNA, 648 bp, Tuberculosis
atgcctggccagccggcccccagccgaggcgaatcactctgggcgcacgccgaggggtcaatatctgaagacgtgatcctggccggcgcccgcgagcgcgcaaccgacatcggggccggggcggtaacaccggcggtgggtgcgttgctgtgcttgctggccaagctcagcggaggcaaggcggtggccgaagtgggtaccggggccggcgtcagcggcctgtggctgttgtcgggcatgcgcgacgacggcgtcttgaccaccatcgatatcgagcccgagcatctacgccttgccaggcaggcctttgccgaggcgggcatcgggccgtcgcgtaccaggctgatcagcggccgcgcccaagaggtgctgacccggctcgccgacgcatcctacgacctggtattcatcgacgccgacccgatcgaccagccagattacgtcgccgagggggtgcggctgctgcgatccggcggggtcatcgtcgtgcaccgggcggcgctgggcggtcgggccggtgatcccggggcgcgcgacgccgaggtgatcgcggttcgcgaggcggcccggcttatcgccgaggatgaacggctcactccggcactggtgccgctgggcgacggcgtgctggcagccgtgcgggactaa

SEQ ID NO: 815 - DNA, 1689 bp, Tuberculosis
atggagtatctgattgcagcgcaggacgtgttggtggccgcggccgctgatttggagggcatcggctcggcgctggccgcagctaacagggcggccgaggccccgaccacggggctgctggccgcgggtgccgacgaggtatcagcggccatcgcgtcgctgttttccgggaacgcccaggcctatcaagcgctgagcgcacaggcggcggcatttcatcagcagtttgtgcgggcactgagttcggcggccggctcgtatgcggcggccgaggccgccaatgcctccccgatgcaagcggtgctggatgtggtcaatgggcccacccagctgttgctggggcgcccgctgatcggcgatggcgccaacggcgggccgggacaaaacgggggcgacggtggcttgttgtacggcaacggcggcaacggcggctcgagtagcaccccaggccagcccggcggtcgcggcggcgcggccgggttgatcggcaacggtggcgccgggggagccggcgggcccggcgcgaacggcggtgccggcggcaacggcgggtggctatacggcaacggtgggctcggcggcaacggtggggcggccacccagatcgggggcaatggcggcaacggaggccacggcggcaacgccgggctatggggcaacgggggggcgggtggagccggagcggcaggagcggccggcgccaacgggcaaaacccggtgtcccatcaggtcacgcacgcgaccgatggcgccgacggcactaccggacccgatggcaacgggaccgacgccggctcgggcagcaacgcagtcaaccccggcgtgggcggtggtgcaggcggcataggcggggatggaaccaaccttgggcagaccgacgtgtccgggggtgccggcggcgacggcggcgacggcgccaacttcgcctccggaggtgccggcggtaacggtggcgccgctcaaagcggctttggtgacgctgtcggcggcaatggcggcgccggcggaaacggcggagccggcggcggcggggggctgggcggagcgggtggcagcgccaatgttgcaaatgctggcaacagcatagggggcaacggtggcgccggcgggaacggcggtatcggcgctcccggtggtgccggcggcgccggaggaaatgccaatcaagataatcctcctgggggcaactccaccgggggcaatggtggtgccggcggcgacggcggcgtcggtgcctcggctgacgttggtggcgccggcggctttgggggcagcgggggtcgcggcgggctactgctcggcacgggcggcgccggcggcgacggcggcgtcgggggcgacgggggcatcggcgctcaaggcggcagcggcggcaacggcggcaacggcgggatcggcgccgacggcatggccaaccaggacggcgacggcggtgacggcggcaacggcggcgacggcggggccggcggggccggtggcgtcggcggaaacggcgggaccggcggtgcgggcggactgttcggacagtcgggcagccccggctccggcgcggccgggggcctcggcggcgcgggcggcaacggcggcgcgggcggcggcggcgggaccgggttcaaccccggcgcccccggcgatcccggtactcaaggcgctaccggcgccaacggtcagcacggcctgaacggctga

SEQ ID NO: 816 - DNA, 1812 bp, Tuberculosis
atgtcgtttgtaatcgccgctcccgagacgctggtgagggccgcttcggatttggcgaacatcgggtcgacgctgggggccgccaacgccgcggcattgggcccgacgacggaacttctggcagccggtgctgatgaggtgtcggcggccatcgcgtcgctgttcgccgcgcatggccaggcctatcaggcggtgagcgctcagatgtcggcgtttcatgcccagttcgttcaaacctttactgcgggcgctggcgcgtacgcgagcgctgaggccgccgccgcggcgccgttggagggcctgctcaacattgtgaacacgcccacccagctgttgctggggcgtccgctgatcggcaacggcgccaacggcgcaccggggaccgggcaagccggcggggccggcgggctgctgtacggcaacggcggggccggcgggtccggggcgcccggccaggccggcggcccaggtggagccgcggggctattcggcaacggcggggcgggtggggccgggggtgacggcccgggcaacggcgcggctggcggggccggcggggccggcgggctgctgttcggctccggcggcgccggtgggcccggcggagtcgggaacaccggcacaggcgggctcggcggcgacggcggggcggccgggctgttcggagccggtggcatcggcggggccggcgggccaggcttcaacggtggcgccggcggggccggcggtcgcagcgggctgttcgaggtgttggccgccggcggtgccggcggcaccggcgggttgagcgtcaacgggggcaccggtggcaccggcggcaccggcgggggcggcgggctgttctccaatggcggtgccggcggcgccggcgggttcggagtctccggctcggccggagggaacggcggcaccggaggcgacggcggcatcttcaccggcaacggcgggaccggcggcaccggcggaactggcaccggtaaccaactcgtgggcggtgagggcggggccggcggggcgggcggcaacgccggcatcctcttcggcgctggcggcattggcggcaccggcggaaccggtctcggcgcgcccgaccccggcggcaccggcggcaaaggaggcgtcggcggcatcggcggtgccggcgcactgttcggtcccggcggcgccgggggcaccggagggttcggcgcctccagtgcggaccaaatggccggcggcatcggcgggtccggtggcagcggcggggccgccaagctgatcggcgacggcggcgccggcggtaccggcggcgacagcgtccggggcgcggccggtagcggcggcaccggcggcaccggcgggttgatcggtgacggcggcgctggtggcgccggcgggactggcatcgaattcgggtcggtcgggggggccggcggggccggcggcaacgccgccgggctctcgggtgcgggcggggccggcggagccggcgggttcggcgagaccgccggcgacggtggggccggcggcaacgccggcctgctcaacggcgatggcggcgccggcggcgccggcggactcggcatcgccggcgacggggggaacggcggcaagggtggcaaggccgggatggtcggcaacggcggcgacggcggcgccggcggcgcaagcgtggtggcaaacggcggtgtcggcggctccggcggcaacgccaccctgatcggcaatggaggcaacggcggaaacggcggagtcggcagtgcgccgggtaagggtggcgccggcggcaccgccgggctgctcggcctgaacggatcacccgggttgtcgtag

SEQ ID NO: 817 - DNA, 960 bp, Tuberculosis
atgaccccaaggcacctgctgaccgccgccgacctcagccgcgacgacgccaccgccatcctcgacgacgccgaccggtttgcgcaggcgctggtcggtcgcgacatcaagaagctgccgacgctgcggggccggaccgtcgtcacgatgttctatgagaactccacccgcacccgggtgtcgttcgaggtagcgggtaagtggatgagcgccgacgtgatcaacgtcagcgctgccggatcttcggtaggcaagggtgagtcgctgcgggataccgcgctgaccctgcgcgcggccggggctgacgcgctgatcatccgccatcccgcgtccggcgccgcccatctgctggcgcagtggaccggcgcccacaacgatgggccggcggtgatcaacgccggtgacggcactcatgaacaccccacgcaggcgctgcttgatgcgctgaccatccgtcagcgcctcggcggcatcgaaggccggcgcatcgtgatcgtcggcgacatcctgcacagccgggtcgcccgctccaacgtcatgctgctggacaccctgggcgccgaggtggtgctggtggcgccacccacattgctaccggtcggggtgaccggctggccggccaccgtctcccacgacttcgatgccgagctgcccgccgccgacgcggtattgatgctgcgggtacaggccgagcggatgaacggcggttttttcccgtccgtacgggagtactcggtccgctacgggctaaccgagcggcgccaggcgatgcttcccggccacgccgtggtgttgcacccgggaccgatggtgcgtggcatggagatcacatcttcggtcgcggactcgtcgcaatcggctgtgctgcaacaggtttccaatggagtccaggtgcggatggcggtgctgttccatgtgctggtgggagcgcaggatgccggtaaagagggtgcggcgtga

SEQ ID NO: 818 - DNA, 963 bp, Tuberculosis
atgcccagtttggacaacaccgccgacgagaaacccgcgatcgaccccatcctgctgaaggtactggatgcggttccgtttcggctatcgatcgacgatgggatcgaggccgtgcgccagcggttgcgcgatctaccgcgccagccggtgcaccccgagctgcgggtcgttgaccttgcgatcgatggaccggcggggccgatcgggacccggatctattggccgccaacgtgtcccgatcaagccgaggcgcccgttgtgctgtatttccatggcggcggattcgtcatgggcgacctcgacacgcacgatggcacctgccgccagcacgccgtcggcgctgacgcgattgtcgtgtccgtcgactaccggctggcgcctgagcacccctaccccgctgccatcgaagatgcttgggccgcaacgcggtgggtcgccgagcatggccgccaggtcggtgctgacctcggccgcatcgccgtcgccggagattccgccggcggcaccatcgccgcggtgatcgcgcagcgagcccgcgatatgggcggcccgcccattgtgtttcagctgttgtggtatccctccactctgtgggaccaatcgctgccgtcgttggccgagaatgccgacgcaccgatcctcgacgtcaaggcaattgccgcgttctcccgttggtacgcaggcgaaatcgacttgcacaacccgccagcgccaatggcgcccggccgagcggagaacctggccgacctgccgccggcctacatcgctgtcgccggctacgaccctttgcgcgacgacgggattcggtacggcgagctgctggccgccgccggtgttcccgtcgaggtgcacaacgcccagacgctggtgcacggctacgttggctatgccggtgtggtgcccgccgccaccgaggccaccaaccgtgggctggtggcgctacgggttgtgctacacggatag

SEQ ID NO: 819 - DNA, 711 bp, Tuberculosis
atgcggacccccagacgccactgccgtcgcatcgccgtcctcgccgccgttagcatcgccgccactgtcgttgccggctgctcgtcgggctcgaagccaagcggcggaccacttccggacgcgaagccgctggtcgaggaggccaccgcgcagaccaaggctctcaagagcgcgcacatggtgctgacggtcaacggcaagatcccgggactgtctctgaagacgctgagcggcgatctcaccaccaaccccaccgccgcgacgggaaacgtcaagctcacgctgggtgggtctgatatcgatgccgacttcgtggtgttcgacgggatcctgtacgccaccctgacgcccaaccagtggagcgatttcggtcccgccgccgacatctacgaccccgcccaggtgctgaatccggataccggcctggccaacgtgctggcgaatttcgccgacgcaaaagccgaagggcgggataccatcaacggccagaacaccatccgcatcagcgggaaggtatcggcacaggcggtgaaccagatagcgccgccgttcaacgcgacgcagccggtgccggcgaccgtctggattcaggagaccggcgatcatcaactggcacaggcccagttggaccgcggctcgggcaattccgtccagatgaccttgtcgaaatggggcgagaaggtccaggtcacgaagcccccggtgagctga

SEQ ID NO: 820 - DNA, 609 bp, Tuberculosis
ttgacgctgatggcgatcgtcaatcggttcaacatcaaagtaattgccggcgctgggttgtttgcagctgctatagcgttaagcccggacgcggcggctgacccgctgatgacgggtggctacgcgtgcatccagggcatggcgggcgacgcgccggtagccgccggcgacccggtggctgccggtggaccggcagccgcgggagcgtgcagtgccgcacttactgacatggctggtgttccgttcgtcgcgcctgggccagtgccggcagctgcaccggtgcccatcggcgcaccggtaccaatccctggcgcaccggtaccgataccgggcgcaccggtaccaatccccggcggaccggtaccgataccgggcgcaccggtaccggtacccgccgttccggctccggtgataccggtcggaactccgctgattgcgcttgggccggtcctggctggtgctcccggggatggtgtggtcagtgctcccatcattggcatgtccggggtcaaggatgcgctgaccgatccggcgccagctggcggaccggtgcctggtcagccggttctgcccggtccttcggcctctgcgcccgcaggtgcgcgctga

SEQ ID NO: 821 - DNA, 1476 bp, Tuberculosis
atgtcgaacgtgatggtagtcccgggaatgttgtcagcggcggcagcggatgtggcgagcatcggtgcggcgcttagcgcggccaacggagccgcggcacccacgacggctggtgtcctggccgccggggccgatgaggtgtcggcggccatcgcgtcgttgttttctggctacgcccgcgactatcaggcgctcagtgcccaaatggccagatttcatcaacagttcgtgcaggccttaaccgcgagcgtgggctcgtatgccgccgccgaggccgccaacgcctcccccttgcaggccctcgaacaacaggtgctcgcggccatcaacgcgcccacccagacactgctggggcgtccgctgatcggcaacggcgccgacgggctgcccggtcaaaacggtggggccggcgggttgctgtggggcaacggcgggaacggcggagccggcgacgccgcccaccccaacggcggcaacggcggggatgccggaatgttcggtaacggcggggccggcggtgccggttacagcccggcggccggaaccggcgcggccggtggagccggcggcgccggtggagccggtggctggctaagcggcaacggcggcgccggcggcaacggcggtactggcgccagcggcgccgacggcggcggcggcctcccccccgtccccgccagccctggcggtaacggcggtggcggtgatgccggtggtgctgctgggatgttcggcaccggcggcgccggtgggaccggcggggacggcggcgccggcggtgccggcgacagtcctaacagcggtgccaacggcgcccgtggcggcgacggcggcaacggcgctgcgggtggggctggtggccggctgttcggcaatggcggcgccggcggcaacggcggcaccgctggccaaggtggcgacggcggcacggcgctaggcgctggcggcatcggcggcgacggcggcaccggcggcgccggtggtactggcggcacagctggcatcggcggcagcagcgccggcgccggcggcgccggcggcgacggcggcgccggcggcaccggcggcggcagctcaatgatcggcggcaaaggcggtaccggcggcaacggcggcgtcggtggcaccggcggcgccagcgcattgaccatcggcaatggcagcagcgccggcgccggcggcgctggcggcgcaggcggcaccggcggcaccggcggctatatcgaaagcctcgacggcaaaggccaagccggcaacggcggcaacggcggcaacggcgccgcgggtggggcaggcggaggcggcaccggcgccggcggtaacggcggcgccggcggcaacggcggtgacggcgggcccagccaaggtggcggcaatcccggctttggcggcgacggcggcaccggcggacctggcggcgtcggtgtgcccgacgggatcggcggcgccaatggcgcgcaaggaaagcacgggtga

SEQ ID NO: 822 - DNA, 864 bp, Tuberculosis
atgaagcttgcccggccggacgtcttccatccgcgcgtcgttttggcgggttggccacagcagcccgccggtgacggcgacgatgctgggctggttgcggccctgcgccaccgcggcttgcatgctggttggctgtcttgggacgatcccgaaatagtccacgcggatctggtgattttgcgggctacccgcgattaccccgcgcggctcgacgagtttttggcctggactacccgcgtggccaatctgctgaactcgcggccggtggtggcctggaatgtcgagcgccgttacctacgtgacctgatggatcggggggtgccgaccgtgcccggcgaggtgtatgtgccgggagagccggtccggttgccacgcaaaggccaggtcttcgtcggtccgaccatcggtaccgggacacggcgctgtagtgcccggttcgctgccgagttcgtcgcgcaactgcacgcggccggccaggcggtgctcgttcagcccggaggttccggtgacgagaccgtgttggtcttccttggcggtgagccgtcgcatgcgtttaccaagcaggccgacacttggcgccagaccgagcccgacttcgaaatctgggacgtgggtgcggccgccgtggccggcgcggccgcgcaggtgggtgttgacccaggtgagctgctctacgcgcgggcccacatcacaggtggaagccgagatccccggttgctggaattgcaattggtggacccgtcgctgggctggcagtggctggacccagacatccgcaatcttgcccagcgtgacttcgcgctatgcgtccagtcagcgttggagcggctggggctgggcccgttctcccatcgacgcccatag

SEQ ID NO: 823 - DNA, 801 bp, Tuberculosis
atgaccattttggaaattaaggacctgcacgtcagcgtggagaaccccgcggaggcggaccacgagatcccgatcctgcgcggcgtcgacctcaccgtgaaatccggtgagacacatgccttgatgggacccaacggctcgggcaagtcgacgctgtcctacgccatcgcgggccatcccaaataccacgtgacgtcgggcaccattaccctcgacggcgcggacgtgctggcgatgagcatcgacgaacgtgcgcgggccggcctgtttctggccatgcaatatcccgtcgaggtgcccggtgtctcgatgtcgaacttcctgcgctcggcggcaaccgccattcgcggcgagccgccgaaactgcggcactgggtcaaagaggtcaaggccgcgatggccgcgctcgacatcgacccggccttcgccgagcgcagcgtcaacgagggtttctccggtggcgagaagaagcgccacgagatcctgcagctagaactgctcaagcccaagatcgccatcctggacgagaccgactccggcctggacgtcgacgcgctgcgcgtggtcagcgagggggtgaaccgctacgccgaatcccagcacggcggcatcctgctgatcacgcactacacccgcatcctgcgctacatccacccggaatacgtgcacgtgttcgtcggcggccgcatcgtcgagtccggtggttcggagctcgccgacgaactcgaccagaacggctacgtgcgtttctcccccgcaagcgggcggtacccccaccaacccgcgccaaccggagcctga

SEQ ID NO: 824 - DNA, 372 bp, Tuberculosis
gtgactacccgagacctcactgccgcacagttcaacgaaaccatccaaagcagcgacatggtgctcgtcgattattgggcctcctggtgcggcccgtgccgcgcgttcgcgccgacctttgccgagtcgtcggaaaaacaccccgacgtggtgcacgccaaggtcgacaccgaagccgaacgagagcttgcagcggccgctcagatccgatccatccccacgatcatggccttcaagaacggcaagttgttgttcaaccaggccggcgcgctgccgccggcagcattggagagcctggtgcagcagctcaaggcctacgaggtggaggccggcgaagccaccacccagaacgggcgagcccaacaagcctga

SEQ ID NO: 825 - DNA, 867 bp, Tuberculosis
atgtggtgtcccagtgtttcgctgtcgatctgggctaacgcttggctcgccggcaaggctgctcccgacgacgtgttggatgcattatcactttgggcgccaacgcaatccgtcgcagcttatgatgccgtggctgcgggccacaccgggctgccgtggcccgacgtccacgatgctggaacggtctcgctcctgcagacactgcgcgccgcggtgggccggcgccgactgcgggggacgatcaatgtggtgttgccggtgccgggcgatgtgcgcgggctggctgcgggaacacagttcgagcacgacgcccttgccgccggcgaggcggtgatcgtcgccaacccggaggatcccggcagcgccgttggcctggtcccggagttctcctatggcgatgtcgacgaagccgcgcagagcgagccactcacgcccgaattgtgtgcactttcttggatggtgtattcacttcccggggccccagtgttggaacactacgagctcggcgatgccgaatacgcgttgcggtcagcggtgcgctcggccgccgaagccttgagcaccatcggactgggatctagcgacgtcgccaagccccgtggcctcgtcgagcagttgctcgaatcgtcacggcaacaccgggttcccgaccacgcgccatcgcgcgcattgcgggtgctcgagaatgccgcgcacgtcgatgcgatcatcgcggtcagtgccgggctgagtcgattgccgatcggaacgcagtcgttgtcggacgctcagcgtgccaccgatgcgttgagaccgttgaccgccgtggtgcgctcggcccggatgtccgcggtcacggcgatcctgcactcggcctggccggactga

SEQ ID NO: 826 - DNA, 435 bp, Tuberculosis
atgcccgtcgctttgatctggcttatcgcggcgttggtgctcgtcggcgcagaggcactgaccggcgacatgttcttgctgatgctcggcggcggtgcgctggccgcctcggtaagcagctggctgctggcttggccgatgtgggccgacggggcggtgtttctcctcgtctcggtgctgctgctggtgttggttcggccggcggtgcggcgccggctgacgcagaccaaaggtgtgcagctgggcatcgaggcgctggagggtaagaaggcggtggtgcttggtcgggtggcccgcgacgggggtcaggtgaagctggacggccaggtgtggacggcgcgcccgctcaacgacggtgatgtgttcgaacctggtgactcggtgaccgtggtgcaaatcgacggcgccacggcggtggtcttcaaggacgtgtag

SEQ ID NO: 827 - DNA, 732 bp, Tuberculosis
atgaggctggcccgtcgcgctcggaacatcttgcgtcgcaacggcatcgaggtgtcgcgctactttgccgaactggactgggaacgcaatttcttgcgccaactgcaatcgcatcgggtcagtgccgtgctcgatgtcggggccaattcggggcagtacgccaggggtctgcgcggcgcgggcttcgcgggccgcatcgtctcgttcgagccgctgcccgggccctttgccgtcttgcagcgcagcgcctccacggacccgttgtgggaatgccggcgctgtgcgctgggcgatgtcgatggaaccatctcgatcaacgtcgccggcaacgagggcgccagcagttccgtcttgccgatgttgaaacgacatcaggacgcctttccaccagccaactacgtgggcgcccaacgggtgccgatacatcgactcgattccgtggctgcagacgttctgcggcccaacgatattgcgttcttgaagatcgacgttcaaggattcgagaagcaggtgatcgcgggtggcgattcaacggtgcacgaccgatgcgtcggcatgcagctcgagctgtctttccagccgttgtacgagggtggcatgctcatccgcgaggcgctcgatctcgtggattcgttgggctttacgctctcgggattgcaacccggtttcaccgacccccgcaacggtcgaatgctgcaggccgatggcatcttcttccggggcagcgattga

SEQ ID NO: 828 - DNA, 693 bp, Tuberculosis
atgaaacgcagcatgaaaagcggctccttcgcgatcggtctggcaatgatgctcgccccgatggtggccgcgcccggtcttgcggccgcagacccggccacgcggccggtggattatcaacagatcaccgacgtcgtgatcgcgcgcgggctgtcgcagcgcggcgtgccgttctcctgggccggcggcggcatcagcggccccacgcgcggcaccggtaccggcatcaacaccgtcgggttcgacgcctccggtttgatccagtacgcctatgccggtgccgggctaaagctgccgcgttcttccggccagatgtacaaggttgggcaaaaggtcctgccgcagcaagcgcgcaagggcgacctgatcttctacggccccgaaggcacgcaaagcgtcgcgttatacctcgggaagggccagatgctggaggtgggcgacgtcgtccaggtttcgccggtgcgcaccaacggcatgacgccttacctggtccgggttctcgggacccagccgacgcccgtccaacaggcgccggtccagccagcgccggtccagcaagcgcccgtccagcaagcgcccgtccaacaggcgcccgtccaacaggcgccggtccaacaggcgccggtccagcaagcgcccgtccagcaagcgcccgtccagccgcctcccttcggcaccgcgcgctcacgctaa

SEQ ID NO: 829 - DNA, 738 bp, Tuberculosis
gtgatgccgctgatacttttgcccgccgtcgacgtggtcgagggtcgtgccgtgcgcctcgttcaagggaaggccggcagccaaaccgagtacggctcagcggtggatgccgcgttgggctggcaacgcgatggcgccgagtggatccatttggtggacctggatgctgcgttcggccgcggttccaaccacgaactgcttgccgaggttgtcggcaagctcgacgtacaggttgagctatccggcggtattcgagacgacgagtcgctggccgcggcgctggccaccggatgcgctcgggtcaatgtgggcactgctgccctggaaaacccgcagtggtgtgcccgggtgattggcgagcacggcgaccaggtcgccgtcggcttggacgtccagatcatcgacggcgagcatcggttgcgcggacgcggctgggaaaccgacggcggcgacctgtgggacgtgctagaacgcctagacagtgaaggatgttcgcggttcgtcgtgaccgatatcaccaaggacggcaccctgggcggccccaatctggacctgctggccggtgttgccgaccgcaccgacgccccggtgatcgcgtccggaggtgtgtccagcctcgatgacctgcgcgccattgcgactctcacgcaccgcggcgtcgagggggccatcgtcggcaaggccctctacgcccgtcggttcaccttgccgcaagcgttggccgcggttcgggactag

SEQ ID NO: 830 - DNA, 795 bp, Tuberculosis
atgctatgtgcccgtaccgacaaccatcaggggaccggtaacgtcgtaacgtcggcgcatatgacccgcgccaacgacgatgatgccggcgcagccggcataggagcagtggcgcatatgacaacagtcgacgacaactacaccggacacgtcgaacgcggcaaggcggcgcgtcgcttcctgcccggcgccacgatcctcaaggcatcggtgggcccgatggacaacaacgcctacctggtgacgtgttcagcgaccggagaaaccctgctgatcgacgccgccaatgacgcggaggtcctcatcgacctggtccggcggtacgcgccgaagctggccctgatcgttaccagtcaccagcacttcgaccactggcaggcgctgcaagcggtggccgcggccaccggggcgccgaccgcggcccatccgatcgacgccgacccgctgccggtcaaaccggaccggttgctcacccacggcgacagcgtgcgcatcggcgagctgacattcgacgtcatccacttgcgcggacacacacccggatcgatcgcgctggccctcggcgggccggtgaccggaggcgtcacacagctcttcaccggcgactgcttgttccccggcggtgtcggcaaaacctggcaacctgccgacttcacccaactgctcgacgacgtcaccacccgggttttcgacgtgtacgccgactccaccgtcatctaccccggccacggtgacgacacggagctgggtgccgaacgccccagcctcagcgaatggcgtgcgcgcggctggtaa

SEQ ID NO: 831 - DNA, 654 bp, Tuberculosis
gtgctaggcaggctgcgtggcggctatcaggtcgaaggccgcgaggttaccccgacccagctgctagagcgtctcgggttccgccgggaccagctgtccgcgcgagtcgacgacctctccggtggtcagcgtcggcggttgcagctcatgctgacgctgttgtccgagccgaacgtgctgctcctcgacgagcccaccaacgacgtggacaccgagatgctgacggcgaccgaagacctgcttgactcgtgggcgggtacgttgatcgtcgtctcacacgaccggtatctgctcgagcgggtcactgaccagcagtacgcgattctcgatgaccggttgcggcacctgcccggcggcatcgacgaatacctgcagctggctgcccgcgttagcgccccagcaccggccgagcggccagcgccgccggcgatgtcgggcgcacagcgacgtgccaccgaaaaagagttggccgcagtcgaccgtcaactcgcccgcctggccgaccgggtggccgccaaacataccgaactggccgagcatgaccagtccgaccacgtcggcatcacccggctgacccagcaactacgtgtcctgcaagaccacgtcgcggcgatggagaatcgctggctggagctttcggagatgctcgaatga

SEQ ID NO: 832 - DNA, 1332 bp, Tuberculosis
gtggcgacaatcgcggcaagccccacgcacaatgccctgggcaaggccgcgcgccggctgttgcccctgctgttcgtgttgtatgtgatcaacttcgttgatcgggccaacatctcggtcgcagccctggcgatgaacgccgacctgcgcctgagcgccaccgcatacggcaccgccgccggcgtcttcttcctcggctacgtcctgttccaggttcccgccaacgcggcgttggcgcgcttcggtgccggtcgaacgctcacggcggtcgtcctggcttggggtgtgtgctcggcggccacggccttggtcaccagcgcgcacaccttgtatctggcgcgcttcgccctcggcgtcgccgagggcggcttcttccccggcgtcatcgcgtatctgacggtgtggtttccgtgcgcgcagcgagcccgcgccgtagccacctttctgctggccattccggtcgccaacacggtcggcctgccgctgtctgggctgatcgtcggccacgttcacatggccgggctacccggctggcgggcaatgtttgtgatcgaggcattgcctgcactgctgctggcgccgcttcttcggcgcctgttgccggataacccgcaacgggcaagctggctcacccccgaggaacgtgcagagctgtcggcccggctgaccgaggacacccctgccccgaccggtcggtcgagtggagccggttgggatcttgtccttttcgctgtcgtctacgggggcctgtatttcgcgctgtatgcgttgcagttctttctgccccaactagttgcgtcgctggcacacggcaccgccacgctgaccgctgccacgttggcggccctgccgtacggtgtcgccgcgctggccatgttggcctggagccaccgcagcatcgaccgctcgggcgcccaagcgggccatatcacactgccaacaacggccgcgggcagcgccgcgctcggtgcggcattgagtccgatgtcaccgatagtgacgctgagttggctgaccatcgccgtcgccggaatccttgccgcgatgcccgctttctggagccgttgcaccgccgcgctggccggtccccgggtcgccgtggccatcgcgacggtcaatgccgtggccagtctggcgagcttcgccggtccctacgccaccggccacctcaaagacgccaccggcacttaccatctcgcgttgctgaccgtcgccgccgtacttgctgccgcggcggcttgtagcttgctactgcggcacgctggccggacagtatgcgccaacgactccgaaatcatgctgcacccgtcgccggcgaccccgttcgtctaa

SEQ ID NO: 833 - DNA, 735 bp, Tuberculosis
atggcagatcggtcggtgcgcccgctgcggcatctcgttcatgcggtgactgggggccaaccgccttccgaggcccaggtccgacaggcagcctggattgcgcggtgcgtcggtcgcggaggctcggcgccactgcaccgtgacgatgtgtcggcattggccgaaacgttacaagtcaaggagtttgcccccggggcagtggtattccacgccgatcaaaccgcggacggggtgtggattgtgcgacacggattaattgagctcgcggtcggctccaggcggcgccgcgccgtggtgaacatccttcatcccggcgatgtcgatggcgacatcccgctgctactggagatgccgatggtctacacggggcgcgccttgacccaagcgacctgcctgttcctggaccggcaggcgttcgagcggctgctagctacccacccggccatcgcacggcggtggctgtcgagtgtggcgcaacgggtgtcgactgcgcagattcggttaatgggcatgcttggccgcccgctgcccgcgcaggttgcgcagctcctgctcgacgaggcaatcgatgcccgtatcgaacttgcccaacgcaccctcgccgcaatgcttggagcgcagcgcccatcgatcaacaagattctcaaggagttcgagcgcgaccgattgatcaccgtcgggtatgcggtcatcgagatcaccgaccaacacggattacgcgcccgggctcaatga

SEQ ID NO: 834 - DNA, 768 bp, Tuberculosis
atgatgatttcatcaagtgatgaattacttcgcgacggtgccgaccccgcggtcatcatcgaccagctgcgcgtcatccgtggtaaacgccttgccctgcaggatgtttcggtccgggtcgcctgcggcacgatcaccggcctgctcggtccgtccgggtcgggcaagacaacactgattcgctgcatcgttggctcccaaatcattgcctcgggttcggtgagcgtgctgggccaaccggctgggtcagccgaactacgccatcgggttggatacatgcctcaggacccgaccatttacaacgacctgcgggtgatcgacaacatccgctacttcgccgaactctgcggcgtcgacaggcaagccgccgatgaggtgatcgaagcggtggacctgcgcgatcaccgcaccgcccgttgtgccaacctgtccggcggccagcgggcccgggtctcgctggcgtgtgcgctggtcggccggcctgatctgctagtgctcgacgagccgaccatcggcctggatccggtattgcgcgtcgaattatgggatcggttcacggcgctggcgcggcgtggcaccacgctgttggtgtccagccacgtaatggacgaggccgaccgctgcggcgatctgttgcttctgcgccaggggcagctgctggcccacacaacgccgcaccgtctacgaaaggaaaccggatgcacatcactggaggaagcgtttctgtccatcgtccgacgcaccaccaccgtgcccgcggccggctaa

SEQ ID NO: 835 - DNA, 624 bp, Tuberculosis
gtggctgagcatgatttcgagacgatatcgtcggaaaccttgcatacgggagccattttcgcattacgtcgggaccaggtgcggatgcctggtgggggtattgtgacgcgtgaggtcgtcgagcacttcggtgccgtagccattgtggcgatggacgacaacggcaacatcccgatggtttatcagtaccgccacacctatggtcggcggctttgggaactgcccgcggggttgctcgacgtcgctggggagccacctcatctcacggccgcccgggagctgcgggaggaggtcgggctgcaagccagcacctggcaggtgctggtcgatctggacaccgcgccgggcttcagcgacgaatcggtgcgggtctatctggccaccggactgcgcgaggtgggccggcccgaagcccatcacgaagaagccgacatgacgatggggtggtatcccattgccgaagcggctcgccgggtgctgcgtggcgaaatcgtcaattccattgccattgccggtgttttggccgtgcacgcggtgacgaccgggttcgcccagccacgcccactcgataccgaatggatcgacaggccaacggcgttcgccgcgcggagagccgagcgatga

SEQ ID NO: 836 - DNA, 570 bp, Tuberculosis
atggacctctattcaaacctcgtcgaagccgaacaacgcctggtcgcgctggtttcgtcgatagaagccgacagctactcctcgccgacgccgtgcgaccgctgggacgtgcgggcgctgctcagccacgcgctggcctcgatcgacgccttcgcggcggccgtcgacggagcacccggaccggacatggcgcaggtgttcagcggtgccgacatcgtcggggacgaccccctcggtgcgacgcagcggatcacccggcggtcgcaggcggcctggtcgaccgtgcgcgatctgaacgcggagctgtcgaccttcatcggcgtgatgccggcggggcaggctcttgcgatcatcaccttctccaccgtcgtccacggttgggacctagcggtggccacgggccaggccggcgaactcccggagcacctggccgaagcggcccaacaggtggcggccgaactggttcccgtcctgcgtccgcggggcctgttcgcacacgacgtcgacctagcgggggaagccacgcccactcagcggctcgtcgcccttaccggacggaaaccgcggtga

SEQ ID NO: 837 - DNA, 360 bp, Tuberculosis
atgtcggaccagccacgtcatcaccaggtcctcgacgacctgctgccccaacaccgcgctctacgtcaccagattccccaggtgtaccagcgatttgtagccctgggcgacgccgcgcttaccgacggcgctctcagccgcaaggtcaaggagcttgtggcgctggcgatcgcggttgtgcaggggtgcgatggctgcgtcgcatcacacgcccaagccgcggtacgggccggcgctacagcgcaagaagccgctgaggccatcggggtcaccatcttgatgcacggtggaccggccaccatccacggtgctcgtgcctacgcggcattttgcgaattcgctgacacaacgccgtcctag

SEQ ID NO: 838 - DNA, 1857 bp, Tuberculosis
atgtcctatctcgtcgtggtgccggagttggtcgcagcggcggcaacagatttggcgaacatcggttcgtcgattagtgcagccaacgcggccgcggcggcaccgaccacggcactggtcgcagccggcggcgacgaggtatcggcggccatagccgcgttgttcggagcgcatgctcgggcatatcaagcgttgagtgcccaggcggcgatgtttcatgaacagtttgtccgggccctcgccgccggcggtaactcctacgccgtcgctgaggcggcaaccgcgcaatcggttcagcaagatctgctcaacctgatcaatgcgcccacccaggcgctgttggggcgtccgctgatcggcaacggcgccaacgggctgccgggtacgggccagaacggcggcgacggcgggattctgtacggcaacggcggcaacggtgggtccggcggggtcaaccaggccggtggcaatggcgggaatgctgggctgtggggcaatggcggatccggcggagccggcgggaacgccaccactgccggccgcaacggcttcaacgggggcgccgggggaagcggcggtttgctgtggggcaatggcggtgccggcggggccggtgggaacggcggtccggctccgctcgtgggcggggtgggcaccaccggtggcgccggcgggaacggcggcggcgccgggttgttctacggtttcggcggcgccggtgggaacggcgggatgggcggggtggcaccgagcaccggcccctcgatgggcatcctcccggccggcggtgtcggcgggcctggtggctccggcggggcgagcgcgcttgccttcggctccggcggcgtcggcggtgccggtggcttgggcgggccgaccgatggcaccgtccagggggtgggcggcttcggcggtcagggcggcaacggcgggcagagcggcttgttgtttggcaacgcgggagccggcggggcaggcgctgccggcggagccggcaccggcgacaccgagagcttcggcggccacggcggggccggcggtgatggcggcgctgttggcttgatcggtaacggcggggccggcggcaccggatctcccggcgctgtggtgggtggtaacggcggcgtcggtggtctgggtggcgccggcagtcccgggggtctgttgtacggcaccgggggggccggcggcaatggcggaccgggtggtgacggtggtactggcgcgacggtgggctttgccggctccggcggtttcggcggtgcggggggcatcgcccagctgtttggcacgggtggcatgggtggtagcggcggtggtataggcgctggcaccacgaccgtggtgccgcccgacgtcgccccggtgggtggcacaggcggcaatggcggtcgcgccgggctgctgttgggtgtgggtggcatgggcggtaatggcggtgccaccagcgtcggcgggacgctctacgccgccggtggaaacggcggcgacggcgggttggtgtggggcaacggtggcaccggcgggagcggtggcgccggcggggcgggcagcgtcggcaacggcggtgcgggtggcaacgcggcactgctgttcggcaacggcggggcgggcggggccggcggcgccggcggcatcggtgccggcggagccggcggcttcggcgcggttctgtttggcaacggcggggctggcgggagcggtgcccccggtggcatcggcgccggtggcaatggcggaaacgcgctgctggtcggcaacggcggcaacggtggggcaggtaccggtggggctgctggcggtgccggtggctcgggcgggttgctattcggccaaaatgggatgcccgggccgtga

SEQ ID NO: 839 - DNA, 366 bp, Tuberculosis
atggggagcgatacggcctggagtccggcgcgcatgatcgggatcgcggcgctcgccgttggaatcgtgctgggtttggttttccatcccggcgtgccagaggtcatccagccgtatctgccgatcgcggtggtcgccgcgctcgacgcggtgttcggtggcttgcgcgcctatctcgagcggatctttgacccgaaggtcttcgtggtttcgttcgtgttcaacgttttggtggctgccctaatcgtctatgtcggtgaccaactgggcgtcggcacacagttgtccaccgcgatcatcgtcgtgctgggcatccgcatcttcggcaacaccgcggccttgcggcggcggttgttcggagcgtga

SEQ ID NO: 840 - DNA, 861 bp, Tuberculosis
atgagcatcgatttcacgccggatccgcagctgtacccgttcgagtcgcgctggttcgacagctcgcgtggacgcatccactacgtcgacgagggcacgggtccgccgatcctgttgtgtcacggcaacccgacgtggagtttcctgtatcgggacatcatcgtcgcactgcgggaccgtttccgttgtgtggctccggattatctgggtttcgggttatcggagcgtccctcgggattcgggtaccagatcgacgagcacgcgcgggtgatcggcgaattcgtcgatcacctgggcctggaccgctacctgagcatgggtcaggactggggtggcccgatcagcatggcggtcgctgtcgagcgtgccgaccgggtccgcggcgtcgtgttgggcaacacgtggttctggccggcggacacgctggcgatgaaggccttcagcagggtgatgtccagcccgccagtgcagtacgcgatcttacggcgcaacttctttgtcgagcgcttgatacccgcgggaaccgagcaccggccgagtagcgcggtgatggcgcactaccgggcggtgcagcccaacgccgcggcacgccgaggcgtagccgagatgcccaaacagatcctggccgcccgtcccctgctggcacggctcgcccgggaggtgccagccacgctgggcaccaagcccaccctgttgatttgggggatgaaggatgtcgcattcaggccgaaaacgattatccccagactgagtgcgacatttcccgaccacgtcctggtggagctgcccaacgccaaacacttcatccaggaggacgcccccgaccggatcgccgccgcgatcattgagcgcttcggctga

SEQ ID NO: 841 - DNA, 423 bp, Tuberculosis
gtgcagccatcgccggactcacccgctccgctgaatgtcaccgtgccgttcgacagcgagttgggtttgcaattcaccgaactgggtcccgacggggcccgagcgcagctcgacgtccggcccaagttgttgcagctgacgggcgtcgtgcacggcggtgtctactgcgcgatgatcgagagcatcgccagcatggcagcctttgcctggctcaattcgcacggcgaaggcgggagtgtggtcggcgttaacaataatacggatttcgtgcgctccatcagctcagggatggtgtatggcaccgccgaaccgctgcatcggggtcggcggcaacagctgtggctggtcaccatcaccgacgacaccgaccgggtggtcgcccgcggccaagtgcggctgcagaacctcgaggcgcggccttaa

SEQ ID NO: 842 - DNA, 978 bp, Tuberculosis
atgcatcaggtggaccccaacttgacacgtcgcaagggacgattggcggcactggctatcgcggcgatggccagcgccagcctggtgaccgttgcggtgcccgcgaccgccaacgccgatccggagccagcgcccccggtacccacaacggccgcctcgccgccgtcgaccgctgcagcgccacccgcaccggcgacacctgttgcccccccaccaccggccgccgccaacacgccgaatgcccagccgggcgatcccaacgcagcacctccgccggccgacccgaacgcaccgccgccacctgtcattgccccaaacgcaccccaacctgtccggatcgacaacccggttggaggattcagcttcgcgctgcctgctggctgggtggagtctgacgccgcccacttcgactacggttcagcactcctcagcaaaaccaccggggacccgccatttcccggacagccgccgccggtggccaatgacacccgtatcgtgctcggccggctagaccaaaagctttacgccagcgccgaagccaccgactccaaggccgcggcccggttgggctcggacatgggtgagttctatatgccctacccgggcacccggatcaaccaggaaaccgtctcgctcgacgccaacggggtgtctggaagcgcgtcgtattacgaagtcaagttcagcgatccgagtaagccgaacggccagatctggacgggcgtaatcggctcgcccgcggcgaacgcaccggacgccgggccccctcagcgctggtttgtggtatggctcgggaccgccaacaacccggtggacaagggcgcggccaaggcgctggccgaatcgatccggcctttggtcgccccgccgccggcgccggcaccggctcctgcagagcccgctccggcgccggcgccggccggggaagtcgctcctaccccgacgacaccgacaccgcagcggaccttaccggcctga

SEQ ID NO: 843 - DNA, 438 bp, Tuberculosis
atgaagtcagcaagcgacccgttcgacctgaagcgtttcgtgtacgcgcaggctccggtctaccgcagcgtcgtcgaggagctgcgcgccggacgaaagcgcggtcattggatgtggttcgtcttcccacaactccgcgggctaggtagtagcccactggcagtgcgctacggcatctcctcgctcgaggaagcccaggcctatctgcagcatgacctgctcgggccccgcttgcatgagtgcaccgggttggtcaaccaggtgcaaggccgctcaatcgaggaaatcttcggcccgcccgacgacctcaagctgtgctcgtcgatgaccctgttcgcccgtgccaccgacgccaaccaggactttgtcgcgctgctcgccaagtattacggcggcggagaggaccggcggacggtggcattactggcggtcacatag

SEQ ID NO: 844 - DNA, 561 bp, Tuberculosis
atgcaacctgacgcctatccagtccgggtccggggtgacctcgatcctgcgttgtcacgttggcagtggctagtcaagtggtttttggccatcccgcactacattgtcttgttcttcttgcacgttgccgccgtggtggtcaccgtgatcgcgttctttgccatcctgttcacgggcagatatccccggacgctgttcgacttcaatgtcggcgtcatgcggtggcgctggcgggttgccttctatgcgctgtcggcgctgggaaccgaccggtacccgcccttcagcctgcagacaaaggcggagtatccggctgacttggaggttgactatccggagcggttgagccgcggcctggtgctgattaagtggtggctacttgctatcccccactacctgatcctggcggtcttcctctccagcggttggcgagtcttcctgatcgacccccacgaccgcgtcggcataatgtggccttcgctactggtgatcctgctgctcgtcgccgtggtggcgctcctgttcaccggccggtaccccatagggctatacaacctgtaa

SEQ ID NO: 845 - DNA, 309 bp, Tuberculosis
gtgtctgtgctggtcgcgttttccgtcaccccgctgggcgtgggggagggggtcggcgagatcgtcaccgaagcgattcgcgtggtccgtgattccggcctgccgaaccagacagatgccatgttcaccgtgatcgaaggcgatacctgggcggaagtgatggccgtcgtgcagcgcgcggtggaggccgtggccgctcgggcaccgcgagtcagcgcggtgatcaaggtggactggcgtcccggggtcaccgacgcgatgacccagaaggtcgctaccgtcgagcggtatcttctccggcctgaatag

SEQ ID NO: 846 - DNA, 864 bp, Tuberculosis
gtgttcccgcgctggccgcagcaggcgcataatcacgaggtgtcccgcgcagataccgtctcagtgccccgtgcgcccacccaggctgaggtcgccgcagtgctgcgcatcatgacgccgctgcgcaaggtgattaaaccaaaggtctatgggatcgaaaatgtgccgaccgaacgcgcattgctggttggcaaccacaacacgcttggcttggtcgacgcgccattgctggccgccgagctctgggagcgggggagaatcgtccggtcccttggcgaccacgcccatttcaagattccggggtggcgcgacgcgctgacacgaacaggggtcgtcgaaggcaccagagagatcacctcggagttgatgcgacgcggcgagctcgtcatggtctttcccggcggcgcccgtgaggtcaacaagcgcaagaacgagcgctacaagctggtgtggaaaaatcggctggggttcgcgcgcttggcaattcagcacggctatccgattgtgccgttcgcttcggtgggtgctgaacacggcatcgacatcgtgctcgacaacgaatccccactgctggcaccggtccagttcctcgccgagaagctgctcggcaccaaagacggtccggcgctggtccgtggtgtcggactgacaccggtaccgcgccccgaacggcagtattactggttcggcgagccaatcgacaccacagagtttatggggcagcaagccgacgataacgccgcacgcagggtgcgcgagcgtgccgccgccgctatcgaacacggcatcgagctgatgctggccgagcgcgcagccgatccaaatcgatccctggtcggacggctcttgcgctcggacgcctaa

SEQ ID NO: 847 - DNA, 522 bp, Tuberculosis
atggcggctggatcagggggcggcacagttggtcttgtcctgcctcgagtggcgtcgttgtccggcttggacggggctccgacggtaccggagggcagcgacaaagcacttatgcacttgggcgacccgccgagacggtgcgacacccatcccgacggcacaagctcagccgcggccgctcttgttcttcgtcggatcgacgttcacccacttctgaccgggcttgggcgagggaggcagacggtgtcccttcggaacggtcacctcgttgccaccgccaaccgggcgatactgtcccgacgtcggagccggcttacccggggacgtagctttacgagccatctgatcacctcctgtcccagactcgatgaccaccagcaccggcatcccacccgctgtcgcgcggaacacgccgggtgtacagtcgcaacctgcatccccaatgcacacgaccctgcccctggccatcagaccccgaggtggggtccttttcgtctaaaaccagcttataccagaatatag

SEQ ID NO: 848 - DNA, 297 bp, Tuberculosis
gtgagtagccgataccttctctcgcctgccgcgcaggcacatctggaagagatctgggactgcacctatgaccgttggggtgtcgatcaggccgagcagtacctgcgcgaacttcaacacgctatcgaccgtgctgcggcaaacccgcggatcggacgagcgtgcgacgagattcgccccggctatcgcaagctctcggccgggtcacacacgttgttctatcgggtgactggcgaaggcaccatcgacgtcgtgcgagtcctgcaccaacggatggacgtcgaccggaacctctga

SEQ ID NO: 849 - DNA, 798 bp, Tuberculosis
atggtaatcgtggccgacaaggcggccggtcgggtcgctgatccggtcttgcggccggtgggcgcgctgggcgatttcttcgcgatgacgctcgacacgtccgtgtgcatgttcaagccgcctttcgcgtggcgtgaatacctacttcagtgctggttcgtggcgcgggtgtcgacgctgcctggggtgttgatgacgatcccatgggcggtgatctcggggtttctcttcaacgtcttgctgaccgacatcggtgccgcggacttttccggcaccggctgtgcgatcttcaccgtgaaccaaagcgccccgatcgtcacggtcttggtggtcgcgggcgcgggcgccaccgccatgtgcgccgatctgggtgcgcgcaccatccgtgaggaactcgacgcactgcgggtgatgggcatcaacccgatccaagcgctagcggctccgcgcgtgctggcggccaccacggtgtcgttggcgctgaattcggtggtgaccgcgacggggctgatcggcgcgttcttttgctcggtgtttctcatgcacgtctcggcgggggcatgggtgaccgggcttaccacgctgacccacaccgtggacgtcgtcatttcgatgatcaaggcgacgttgttcgggctgatggccggactgatcgcctgctataagggcatgtcggtcggtggcggcccggccggagtcggccgggcggtgaacgaaaccgtggtgtttgccttcatcgtcttgttcgtgatcaacatcgtcgtcaccgcggtcggcatcccattcatggtgtcctga

SEQ ID NO: 850 - DNA, 654 bp, Tuberculosis
atgactccacgcagccttgttcgcatcgttggtgtcgtggttgcgacgaccttggcgctggtgagcgcacccgccggcggtcgtgccgcgcatgcggatccgtgttcggacatcgcggtcgttttcgctcgcggcacgcatcaggcttctggtcttggcgacgtcggtgaggcgttcgtcgactcgcttacctcgcaagttggcgggcggtcgattggggtctacgcggtgaactacccagcaagcgacgactaccgcgcgagcgcgtcaaacggttccgatgatgcgagcgcccacatccagcgcaccgtcgccagctgcccgaacaccaggattgtgcttggtggctattcgcagggtgcgacggtcatcgatttgtccacctcggcgatgccgcccgcggtggcagatcatgtcgccgctgtcgcccttttcggcgagccatccagtggtttctccagcatgttgtggggcggcgggtcgttgccgacaatcggtccgctgtatagctctaagaccataaacttgtgtgctcccgacgatccaatatgcaccggaggcggcaatattatggcgcatgtttcgtatgttcagtcggggatgacaagccaggcggcgacattcgcggcgaacaggctcgatcacgccggatga

SEQ ID NO: 851 - DNA, 540 bp, Tuberculosis
gtgtccgccctcggacggtcgcgacgggcatggggctggcaccggctccatgacgaatgggcagcgcgggtagtcagcgcggccgcagtgcggcccggtgagctcgtgtttgacatcggcgccggcgaaggggcactgacggcgcatctagtgcgagcgggggcgcgggtggtcgccgtggagttgcacccgcgacgagtcggtgtcctccgcgagcgattccctggcattaccgtggtgcacgcggacgccgcctcgatccggttgcccggccggccgttccgggttgtggcgaacccgccgtacgggatttcgtcccgcctgctgcggacgctgctggcacccaacagcgggcttgtcgcggccgatctcgtgctgcagcgagccctcgtatgtaaattcgcttctcgcaacgcgcgaaggttcaccctgaccgtcggcctcatgctgccacggcgcgcgttcctgccaccgccgcatgtggattccgcggtgctcgtcgtccgccgccggaagtgcggtgactggcaggggcggtaa

SEQ ID NO: 852 - DNA, 753 bp, Tuberculosis
gtgcaccataaccgcgatgtcgacttggcgcttgtcgagcgacccagctcgggatacgtctacacaacgggttggcgactggccacaacggacatcgacgagcaccaacaactgcgcctcgacggtgtggcgcgctatatccaagaggtcggtgccgagcatctcgccgatgcccaattggcagaggtccatccccattggattgtcctgcgcacggtcatcgatgtcatcaacccgattgagctacccagcgacatcacctttcaccggtggtgcgcagcgctttccaccaggtggtgcagcatgcgtgtgcagctgcaaggatccgccggcggccgcatcgaaaccgaagggttctggatctgcgtgaacaaagacaccctgacgccgtcccgtctcaccgatgactgcatcgcacgtttcggcagcaccaccgaaaaccaccggctcaagtggcgcccatggctcaccgggccgaacatcgatggtaccgagacaccatttcccttgcgtcgcacggatattgacccgttcgagcatgtcaacaacaccatctactggcacggtgtgcacgaaatactctgccagatacccaccctgacggcaccctaccgcgccgtgctcgagtaccgcagccccatcaagtccggcgaaccgctgaccattcgttacgagcagcacgacgacgtcgtgcgcatgcacttcgtcgtcggcgacgacgtgcgcgcggcagcgctgctgcgcaggctataa

SEQ ID NO: 853 - DNA, 432 bp, Tuberculosis
atgtccgatgagatcgctcggctggtagcagacgtattcgagctcgctggcctgctacggcgctcaggtgaggtggtcgctgccagagaggggcacacgcaggcgcgatggcagctgctgagcgtggtctccgatcgagcgctgaccgtgccccaagccgctcgccgccttggtgttacccgtcagggggtgcagcgagtggccaacgatctggtcgtttgcggcttggccgagctcagacacaaccccgaccaccgcacatcaccactgctggtgctaaccgagaatggtcgccgcgttctccaggcaatcaccgaacgcgccatcgtcgtcaacaaccgacttgctgacgccgtagacccggccgcgctgcaagcgacccgcgacagcctgaggcggatgatcgtcgcgctgaaagccgaacgtccttga

SEQ ID NO: 854 - DNA, 843 bp, Tuberculosis
gtgctggatcgctatggaaccgacgtgcttgccgcaggcgggcggcgccggccccgctcggttgagcacccggtcgagctcggcatggtcgtcgaagacgccgagaccggctacgtcggtgcggtggtccgagtcgaatatggccgcatcgacttggaagaccgctacgggaagacccgcgggtttccgctgggccccgggtatctactcgacggcctgccggtgatcctcaccgcgccgcggtgcgcagcggctgccggcccgaggcgaacggcatccggctcggtcgcggtgccgggcgcgcgtgcccgggtggcccgggccagccggatctatgtcgagggccgacacgacgctgaactcatcgcggcggtatggggagcggacctgcgaatcgaaggtgtcgtcgtcgaacatctcggtggcgtcgacgacctggtggagatcgtcgccaagttccggcccggcccgcggcgtcggctcggcgttctcgttgaccatttggtcgcggggtcgaaagaggcgcgcatcgccgaggtggtgcgccgcggaccgggcggctccgacactttggtcgtcgggcacccctacgtcgacatttggcaggcggtcaagccacaacgagttgggctggccgcctggccgagggtgccgcggcacatcgagtggaagcacggcgtgtgcgatgcgctcggctggccgcacgccgaccaggccgacatcgccgcggcgtggcggcgcatccgttcgcaagtacgcgactggaccgacctagagccggcgttgatcggccgggtggaagaactgatcgacttcgtcactcagccggccggggacgaatag

SEQ ID NO: 855 - DNA, 657 bp, Tuberculosis
atgcggatcgccgcgctggtcgcagtgtcgttgctgattgcggggtgctcgcgcgaggtcggcggtgatgtagggcagtcgcagaccatcgccccgccggcgcccgccccgtcggcggcgccgtcaacaccaccggccgcaggagcgccgatcaccactatcgtgtcttggattgaggcgggtcacccggttgatcccgccgcctatcacgtcgccacccgcgacggcgtcaccacccagcttggcgacgacgtcgcgttcagcgcttcgtcgggcacggtggcctgtatgacggatgccaggcacactagcggcaccctggcctgcctggtccgactcgcgaacccaccaccccggcccgagacggcctacggcgaatggaagggcggctgggtcgactttgacggcatccacctgcaggtcgggtccgcccgcgccgacccgggcccgttcgtctacggcaatggacccgagctggccaacggggacacgctgtcgatcggggactaccgctgccgctcctatcaagcgggcctgttctgcgtgaactacgcccatcagtccgcggtccggttcgccagcgccgggatcgagccgttcggctgcctgaagccggcgccgccacccgacggcgtgggcgttgcgttcggctgctga

SEQ ID NO: 856 - DNA, 558 bp, Tuberculosis
atgaccgcgacggcaagcgacgacgaggccgttaccgcactcgccttgtcggcggccaaggggaacgggcgggcccttgaggcgtttatcaaagccacccagcaagacgtgtggcggttcgtcgcctatctgtccgacgtgggcagtgcggacgatctcacccaagagacattcctacgagcgatcggcgccatcccgcggttttccgcacgctccagcgcccgaacttggttgctggccatcgcgcgccatgtcgtcgccgatcacatccgccacgtccgatcccggccccgcaccacccgcggcgcgcgtcccgaacatctcatagacggcgaccgccatgcccgcggattcgaagacctcgtcgaggtaaccacgatgatcgccgacctaaccaccgaccaacgggaagcgctgctgctgacccagctgctcgggctgtcctatgcggacgccgcggcggtgtgcggctgcccggtgggcaccatccgatcccgtgtcgctcgagcgcgcgatgcgctgcttgccgacgcggagcccgacgacctcaccggctag

SEQ ID NO: 857 - DNA, 750 bp, Tuberculosis
gtggacgacacgggcgctgctccggtagtaattttcggcggccgcagccagatcggcggcgaactcgcgcgacgcctggctgccggggcgacgatggtgctggccgcgcggaacgccgatcaactcgccgaccaggccgccgcactccgcgcagctggcgctatagcggtgcacacccgggagttcgacgccgacgacctggccgcacacggcccgttggtcgcttcgctcgttgccgagcacggccccatcggcaccgcggtgctggccttcgggatactcggcgaccaggcccgcgccgagacagacgcggcgcacgcggtggccatcgtgcacaccgactacgtcgcccaggtcagcctgctgactcatctggcagcggcgatgcgcaccgccggacggggatcgctggtggtgttctcctcggtcgccgggattcgggtgcgccgcgccaactatgtctacggatcggccaaagccggcctggacggcttcgccagcggcctggccgatgcgttgcacggcaccggggtgcggttactgatcgcgcggccgggattcgtcatcgggcgcatgaccgagggcatgacgcccgcacccctgtcggtcaccccggagcgggtggccgccgcgaccgcgcgtgcgctggtcaacggtaagcgcgtggtgtggattccgtgggcgctgcggccaatgtttgttgcgctgcggttgcttccccggttcgtctggcgcaggatgccgcgatga

SEQ ID NO: 858 - DNA, 972 bp, Tuberculosis
atgctggccaccctgtcccaaatccgggcatggagcaccgagcaccttatcgatgcggccggctactggaccgaaaccgcggatcggtgggaagacgtgtttctgcagatgcgaaaccaggcccatgccatcgcctggaatggcgccgggggcgacgggctgcgacaacgaacccgagctgacttctcaacggtcagtggcatagccgaccagctgcggagagcagccacgatcgcgcgcaacggcgccggcactatcgacgcggcacaacgaagagttatgtatgctgtagaggacgcccaggacgccggtttcaacgtcggtgaagacctatcggtcaccgacaccaaaacgacgcagccggctgcagtgcaggccgctcgactagctcaggctcaggcgttggccggtgacatccgcttacgtgtcgggcaactggttgcggcggagaacgaggtgtccggtcagctcgccgcgaccaccggtgatgtgggaaatgtccgcttcgcgggcgccccggttgttgcccacagcgcggttcagctagtcgacttcttcaaacaagacggcccaacacctccaccgccaggagcgccacacccgtccggtggagccgacggaccgtactccgatccgatcacttcaatgatgctgccaccggccgggacagaggcacccgtatcagacgcgaccaaacggtgggtggacaacatggtcaacgagctggccgctaggccgccggatgaccccatcgcggtggaggcgcgccggctggcgtttcaagctctgcaccggccatgtaacagcgcggagtggacggcggctgttgcgggtttcgcaggatcatcggctggcgtagttgggaccgccctagcaattccggccggccctgccgactgggcactacttggcgccgccttactgggggttggcggatcgggagcggcggtggtcaactgtgccaccaagtag

SEQ ID NO: 859 - DNA, 1305 bp, Tuberculosis
ggccagagctatcaagcggtcagcgcccaggcggcggcgtttcatgaccggttcgtccaactgcttaacgccggtggaggttcatatgcgagcgccgagattgccaacgcgcagcagaacctgctgaacgcggtgaacgcgcccacccagacgctgctggggcgtccgctggtcggcgacggcgccgacggggccagtggtccggtgggacagcccggcggggacggcggcatcttgtggggcaacggcggcaacggtggcgacagcacgagccccggggttgccgggggagccggcgggtcagcggggctgatcggcaacggcggcaggggcggcaacggtgcgcccggcggtgcaggaggcaatggcggcctgggcggattgctgctgggcaacgggggtgccgggggagtcggcggtaccggtgacaacggtgtgggagacctcggtgctggcggcgggggaggcgatggcggtttgggtggacgggcggggctgatcggtcacggcggtgccggcggaaacggtggggacggtgggcacggcgggagcggcaaggccggcggcagtggcggcagtggcggcttcggccagttcggtggcgccggcgggctgctgtacggcaatggaggggcggccggttccggcggcaacggtggcgatgcaggtaccggcgtctccagcgacggtttcgccgggttgggcggcagcggtggccggggcggcgacgcggggctgattggtgtcggcggcggcggcggcggcaacggcggcgacccagggctcggtgcgcgcctgttccaggtaggtagtcgcggcggcgacggtggggtcggcgggtggctgtacggcgatggcggcggcggcggcgacggcggtaatggggggctgccatttattggctccaccaacgccggcaacggcggcagcgcgcggctcatcggcaacggtggtgccggcggtagcggcgggagcggcgcgcctggctcggtcagcagcggtggcgtcgggggcgcgggcaaccccggcggcagcggtggcaacggcggcgtgtggtacggcaacggtggcgccggcggggccgccggccaaggggggcccggcatgaacaccacctcgcccggcgggccgggcggtgtcggcgggcacggcggcaccgccatcttgttcggcgacggtggcgccggtggggctggcgccgccggcggacccggtactccggacggggccgcggggcccggcggcagcggcggcaccggcgggctgctgttcggagtccccggcccgtccggcccggacgggtaa

SEQ ID NO: 860 - DNA, 717 bp, Tuberculosis
gtgctggaggacatcggcctgggtaaccggctgcagcgtggccgcagctatgcgcgcaaggggcaggtgatctcgctgcaggtggatgccggcttggtcaccgcgctggtgcagggcagccgggcccggccgtaccggatccgcatcgggattccggcgttcggcaagtcgcaatgggcgcacgtcgagcgaaccctggccgaaaacgcttggtacgcagcaaaattgctgtccggcgaaatgcccgaagacatcgaggacgtcttcgccggcctgggcctgtcgctattccccggcaccgcccgagagctatcactggactgctcctgccccgactacgcggtcccatgcaagcacctggccgccaccttctacttgctggccgagtccttcgacgaggatccgttcgccatcctggcgtggcgtggccgcgagcgggaggatctgctggccaacctggccgctgcccgcgccgacggagcggcaccggccgccgaccacgccgaacaagtggcccagccgctcaccgactgcctagaccgctattacgcccggcaggccgacatcaatgtccccagcccgccggcaaccccatcgacggcattgctcgaccagctgcccgacaccggactcagcgcccgcggacggccgctgaccgagctcctgcgacccgcctatcacgccctgacgcaccatcacaacagcgcgggcggctga

SEQ ID NO: 861 - DNA, 624 bp, Tuberculosis
atgtcggctcccgaacgggtaaccggcttgtccgggcaacgttacggggaagtccttctcgtaacacccggggaggccggtccacaggccaccgtttacaacagcttcccgcttaacgattgtccggccgagctgtggtccgcgctcgatccgcaagccctagccaccgaacacaaagcggccaccgccctgctcaacggtccgcgctattggttgatgaacgccatcgagaaggcgccccagggcccgccggtgacgaagaccttcggcgggatcgagatgctccagcaggccacggtgctgctgtcatcgatgaaccctgccccatacaccgtcagccaggtcagccgcaacacggtctttgtgttcaacgccggcgaagaggtctacgaactgcaggaccccaagggacagcgctgggtgatgcagacgtggagtcaagtggtggaccccaacctgtcccgagccgacctgcccaagctgggtgaacggctcaacctgccagccgggtggtcctatcatacccgcgtgcttaccagcgagttgcgggtcgacactaccaaccgggaggcccgcgtcctgcaagacgacctcaccaacagctactcgctggtgaccgcctga

SEQ ID NO: 862 - DNA, 831 bp, Tuberculosis
atgtcttggtggcaagtcatcgtgttggccgcggcccagggtttgaccgagttcctgccggtgtcgtcctcgggacatctggcgatcgtgtcgcggatcttcttcagcggcgacgccggtgcctcgttcaccgccgtgagccagttgggcaccgaggccgccgtagtgatctactttgcgcgcgatattgtgcgcatcctgagcgcttggttgcacggcctggtcgtgaaggcacatcgaaacaccgattatcggctgggctggtatgtcatcatcggcacaatcccgatctgcattctgggcctgttcttcaaagacgacatccggtcgggcgtccgcaacctgtgggtcgtggtgaccgcgctggtggtgttttccggggtgatcgcactcgccgaatacgtggggcgccagagtcgtcacattgagcggttgacctggcgggatgccgtggtggttggtattgcccaaaccctggcgctggtccccggggtatccaggtccgggtcgaccatcagcgctggactgtttctcggactcgaccgtgaactggccgcccgattcggattcctgctggccattccagcggtgttcgcctccgggttgttctcgttgcccgacgcattccacccggtaaccgagggcatgagcgctactggcccgcagttgctggtggccaccctgatcgcgttcgtcctcggtctgaccgcggtggcctggctgctgcggtttctggtgcgacacaacatgtactggttcgtcggctaccgggtgctcgtcgggacgggcatgctcgtgctgctggctaccgggacggtagccgcgacatga

SEQ ID NO: 863 - DNA, 1599 bp, Tuberculosis
atgtcgtttgtgattgcggcgccggaggtgatggcagcggccgccacggatttggcgaacatcgggtcgtcgatcagcgccgccagtgcggcggcggcaggccccacgatgggaatcctggcggccggcgccgacgaggtgtcggtggcgatctcggcgttgttcgggtcgcacgcccagggctatcagacgttgagcgctcagctggcggcgtatcacaaccagttcgtgcgggccctgaacgccggcgcgggctcgtatgccagcgccgaggccgccaacgtgcagcagaccctgctcaacgcgatcaacgcgcccacccaaacgttgctggggcgcccgttgatcggcaacggcgccgacgggggtcccgggcaaaacggtgggcccggcggcttgttgtacggcaacggtggtaacggcggggccggtgacaccgccaatcccaacggcggcaacggcggatcggcggggctgatcggcaacggcggggccggaggcgcgggtgcggccaccggagcgggaggtgcgggcggcaatggcggatggctgtacggcaacggggggcccgggggtgcggccgggctcggcaccgccgggggcgtcagccccgccggcggggccggcggggccgccgggctgtggggccatggcggggccggcggggccggcggcagcgcatccggggcaccgggggccggcggcgccggtggtgacggagggcgcggcgggctgctgtacggcgacggcggggccggcggggctggtgggaacggaagcaacggggtgaccggggtgcacggcggaaacggcggtgccggcggcgccgccgggctgatcggcaacggtggcgccggcggtgacggcggtaacggcgggctcagcaacaccggcgccagcggtggggcgggtggtgccggcggggccgccctgatcggtaatggcggcgacggggggcacggcggcaacggtggccacggcaacagcggtggggccggcggcgccggtggggccggtggggccggtggggccggtgggcacgtcgggctgatcggcaacggcggcaacggcggtgccggcggcaacgggggcaacgacaacagctccacccttgccgatgcggggtccggcggcgccggcgcggccggcggcaacggcgggctgttctacggcaacggcggcgtcggcgggcgcggcggcaacggcggcttctcgtcggccggcaccagcggcggggacggcggcatcggcggtgccggcgggatcggcgggctgatcggcagcggcggcggcggcggggacggcggcaacggcggacaggctcccacgccgggtaatgccggtgacggcggcgccggcggcaacgccaggctgatcggtgacggcgggcgcggcggcaacggcggggaaggcggcgacggccccccaggcgttaaaggcgacggtggtaacgggggcaacggcggcaacgccgtggtgatcggcaacggcggcaacggcggggccggcggcttcggcatacccgtcggaagtggtggtgccggcggcagccgtggtgtgctgttcggcacccctggagcaaacggcgccgacggctga

SEQ ID NO: 864 - DNA, 1155 bp, Tuberculosis
atgagggccaagcgtgaggcaccgaaaagccgcagcagcgatcgtcgcaggagagccgacagtcctgccgcggcgacgaggcgaacgactacgaactcggcgccgtcgcgccgcatccggagccgtgccggcaagacctcggcacccggccggcaggcccgggtgtcgcgccctggaccgcaaaccagcccgatgctcagcccgttcgaccggccggcccccgcaaagaacaccagccaggccaaggcgcgggccaaggcccgaaaagccaaggcgcccaagctggtccgtcctacgccgatggagcgtctcgccgcccggctcacgtcgatcgacctgcggccgcgcacgttggcaaacaaggttccgtttgtggtgctggttatcggttcgctcggcgtcggactaggcctcacactgtggttgtccaccgatgccgccgagaggtcctaccagctgagcaacgcccgggagcggacccggatgctgcagcagcacaaggaagcgctggaacgcgacgtacgcgaggctgcgtcggcgccggcgctggccgaggcggctcgtcgccagggcatgatcccgacgagggataccgcccacctggttcaggatccggacggcaattgggtggtggtcggtacacccaagccggctgacggagttccaccgccgccgctgaacacgaagttgcccgaagatccgccgccgcccccgaaacccgcggcggtgcccctcgaggtgccggtccgggtgacaccaggccccgatgatcccgctccgcccgcccggtctggcccggaggtgctggtgcgtaccccagacggcacagcgacgctgggcggcgcaacccacctgcccacccaggccggcccgcagctgcccggtccggtgccgatacctggggcgccgggtccgatgccggctcctccgctcggcgcagtgccatccccggcaccagcggaaaatccggtgccgctccaggtgggtgcggcgcccccggccgggctccctggaccagcaccggtggctgcgacgcccgggctgtcgggtgggtcgcaacccatggtggcaccacccgctccagtgccggccaacggcgaacagttcggtcccgtcacggcgccggtgccaacggcgccgggggctcccaggtga

SEQ ID NO: 865 - DNA, 432 bp, Tuberculosis
atgtttctcggcacctacacgcccaaactcgacgacaaggggcggctgacgctgccggccaagtttcgcgacgcgttggcaggggggttgatggtcaccaagagccaagatcacagcctggccgtttacccgcgggcggcgttcgagcagctggcgcgccgggccagcaaggcgccacgaagcaaccccgaggcgagagcgttcctacgtaatctcgccgccggtaccgacgaacagcatcccgacagtcaaggccggatcaccttgtcggccgaccaccgccgctacgcaagcctttccaaggactgtgtggtgatcggcgcggtcgactatctcgagatctgggatgcgcaagcctggcagaactaccaacaaatccatgaagagaacttctccgcggccagcgatgaagcactcggtgacatcttctga

SEQ ID NO: 866 - DNA, 744 bp, Tuberculosis
atgtggtactacctgttcaagtacattttcatgggtccgctctttacgttgcttggtcgcccgaaagttgaaggactggaatacatcccgagttcgggtccggccatcctcgccagtaaccatcttgcggtggcggatagcttctaccttccgttggtagttcgccgtcgtatctggttcctggcgaaatcggaatacttcaccggcaccggactgaaaggctggatcaaccgctggttctacagcgtctccggccaggttcccatcgaccgcaccaatgccgactccgcgcagggcgcactgcagacggcagtggtgttgctgggtcagggcaagctgctgggcatgtatccagaaggcactcgctcgccggacggtcggctctacaaaggcaagaccggcctagcccggttggcattgcacaccggggttccggtgattccggtggcgatgatcggtaccaacgtcgtcaacccgccgggcaggaagatgctgaggttcggcagggtcaccgttcggtttggcaagccgatggacttctcccggttcgaggggttggccggtaaccatttcatcgagcgggccgttaccgacgaagtgatctatgagctgatggggctctcgggtcaggagtacgtcgacatctatgccgccagtgtcaaagacggccgcaacgcgggcggtgccggtgcaaatcccaattcaacggacgccgcacgaatccccgagacagccgctggctag

SEQ ID NO: 867 - DNA, 357 bp, Tuberculosis
atgacggtgcagaacgagccgagcgccaagacccacggcgtgatcctgaccgaagcggccgccgccaaggcgaagtcgctgttggaccaggagggacgggacgatctggcgctgcggatcgcggttcagccgggggggtgcgctggattgcgctataaccttttcttcgacgaccggacgctggatggtgaccaaaccgcggagttcggtggtgtcaggttgatcgtggaccggatgagcgcgccgtatgtggaaggcgcgtcgatcgatttcgtcgacactattgagaagcaaggcttcaccatcgacaatcccaacgccaccggctcctgcgcgtgcggggattcgttcaactga

SEQ ID NO: 868 - DNA, 750 bp, Tuberculosis
gtgatgcgttcgctggcaacagctttcgcattcgcaacggtgatacccacaccgggctcagcgaccaccccgatgggccgtggcccgatgaccgcgctgccggtggtgggcgcggcgctgggtgcactggcggcggcgatcgcatgggctggcgcgcaagtgttcggcccgtccagcccgctgtccggcatgctcacggtggcggtactgctggtcgtcactcgaggcctgcacatcgatggcgttgccgataccgctgacggactgggctgctatgggccgccgcagcgtgcgcttgcggtgatgcgcgacgggtcgaccggaccgttcggggtggcggccgtggtcttggtcatcgccttgcagggcctggccttcgcgaccctcaccacggtcgggatcgctgggatcacgctggcggtcttatccggccgggtcaccgccgtactggtctgtcgccggttggtgccggcagcccacggcagcaccctgggctcgcgggtcgccggtacgcaacccgcgccggtggtggcggcctggctcgccgtcctgctcgccgtttcggtgccggccggtccccggccttggcaaggaccgatagcggttctggtagcggtgacggccggcgcggccctggcggcgcattgcgtgcaccggttcggcggtgtcaccggtgacgtgctgggcagcgcgatcgagctgagcacgacggtcagcgccgtgacgcttgcgggcttggcccggctttag

SEQ ID NO: 869 - DNA, 1140 bp, Tuberculosis
atgagtgtgcggctggccgatgtcatcgacgtgctggaccaggcctacccgccgcggcttgcccagtcgtgggattcggtgggtctggtgtgcggcgaccccgacgacgtggtggattcggtgaccgttgcggtggacgcgacgccggcggtggtggaccaggttccccaggccggactgctattggtgcaccacccgttgttactgcgtggggtcgatacggtcgcggccaacacgccaaagggtgtgctggtgcaccgcctgatccggaccggtcgctcgttgtttaccgcgcacaccaacgccgactcggcgtcgccgggtgtgtccgacgcgctggcacacgctgttggtctgaccgtcgacgccgttctcgacccggtgcccggagcggccgatctcgacaagtgggtcatctatgtgccgcgcgagaactcagaggcggtgcgggcagcggtctttgaggccggtgccggccatatcggcgactactcgcactgcagctggagtgtcgcgggtaccgggcagttcctggcgcacgacggggcgtcgcccgccataggcagcgtcggtaccgtcgaacgggtggccgaggaccgggtcgaggtcgtcgcacccgcacgagcgcgcgccgaggtgttggcggcgatgcgcgccgcgcacccttacgaggagccggcattcgacatcttcgcgctggtaccaccgccggtcggcagcgggttaggccggattggcagactgccaaaacccgaaccgctgcgcacctttgttgcccgtctggaggccgcgttgccgccgactgcgaccggtgtgcgcgccgccggggatcccgacctgctggtgtcgcgggtcgcggtctgcggcggcgccggggactcgttgcttgccaccgtggccgccgcggacgtgcaagcgtacgttacggccgatctgcgacatcatccagccgacgagcattgccgagcttcgcaagtggccctgatcgacgtcgcgcattgggcaagcgaattcccgtggtgcggccaggccgccgaagtgttgcggtctcatttcggcgcgtcgctgccggtgcgtgtgtgcaccatctgcaccgacccgtggaacctcgatcacgaaactgggagagatcaggcatga

SEQ ID NO: 870 - DNA, 1779 bp, Tuberculosis
atggcaacaggggcgagaccggcattaggcttgtcgatcggtgtcaccaacctagcggctgtggctgccgatcactccatcacacgtaaacccgtgctgacgctgtatcgacagcgcccgcccgaggtcggtgtgccatcggagaacccgaggctggacgagccaggcctggtgatcaccgacttcgtagaccgggtgggagattcggtcggcatcgtggctgccgacggctcggtgtaccgcagcgaggcgctagtggctgacgcactgctggcgctggcctacaccgctaccggcggtcgtgctcttcccggaagtgtcacggtgacctatcccgcccactgggggccggctgcggtagcagcgttggatagcgcgctgcgtcgggcctcggaatggtcgcacgggacttcgagtacggcccagccactgtcactgctccctgacgccgcggcagcgctgtacgcgatacgggccgacccgggcataccggcccgtgggatcgtcgcggtatgcgacttcggtggcagcgggaccggcatcacgctcgtcgacgccgcagacgagtatcggccggtggccgcgacggtgcgccatcaggctttctccggcgatctgatcgatcagtcgctgttgagctacgtcatgtccgaactaccgggcacgggcgcgttcgatccagccggcacctcggcgatcggctcactgactaagctgcggatcgaatgtcgcaaagccaaggaacggctttcgtcaagcacggtgaccacgctgaccgacgcgttgggcggggatatccggttgacccgcaacgagctcgaggacacaatccgtgactcgctggacagcgtgggcagggccttggaacaaaccctggcccgcagcggaattcgcacggccgagctggtagcgatcgtttcggtgggtggtggtgcaaatatcccggcagtcaccacgacgctgtccggacgtttctgcgtgccggtggtcaggacgcctcgtccgcaattgacggccgctttcggcggcgcgttgtgggcggcacgcagacccggcgacaccagcgcaacggtgctgaccgcggtcacctcggcgacggcgacggcgccggccgatgcgccggcgtcggtcctgcagcccgctttggcctggtcggaggccgacgaggactcccacatcgggccggcccctggctacacagcggcccgcccgtcgctgagcttcgaccacgatgcccatgcggagcccgagcccaagtccccgccaatcccgtggtatcgcctgccggccgtgatcatcaccggcacgacggtggcggtgttgctggtgggtgccgccgtggcgatcgggttgtccaccggcgaccagccgacggcgccggggaccccgcagaggccgggtgtgaccacgaccgccgcaccgcccccgtccccagcgccggcatccgatggccccactaccgagcccgcacctcccgtacaggcgccagccaccggtgggcccgcgccgccgctgcagcagccgttgccgcctccgccgacaacgacgaatacgcaaccggcggtgaccaccgatgtcatcactccggcaccgacgacccccgcttccgcgccgccggcgaccacgcagccgccggcgaccacgcagccgccggcgaccacgtcccccagccctccaccgatcccgccgatcccaccgattccggagattccgcagctcccccccggaatacctcaggttcccgggatcgggcagttcagcgcgatttcgggtagctga

SEQ ID NO: 871 - DNA, 855 bp, Tuberculosis
gtgcaagcccgtggtcaggtcctgatcaccgccgcggaactggctggcatgatccaggccggcgatccggtgtcgatcctggatgtgcgctggcggcttgatgaacctgacgggcatgcggcctacctacagggtcacctgccgggagcggtatttgtgtcactcgaggacgaactgagcgatcatacgatcgccggccggggccggcacccgctgccgtcgggggctagtctgcaagccaccgtccgccgatgcggaatccgacacgatgtgccggtcgtggtctacgacgactggaatcgagccggttccgcgcgagcgtggtgggtgttaactgcggctgggatcgcgaatgtacgcattctagacggcggcttgcccgcgtggcggtccgcaggcggcagcatcgagaccggccaggtcagcccgcagctcgggaatgtgactgtgctgcacgatgatttgtatgccggacagcggctaaccctaacggcgcagcaagccggtgcgggtggtgtgacgctgctcgatgcgcgcgtaccggaacgtttccgcggcgatgtcgagcccgtggatgcggttgccggtcacatccccggcgccatcaacgttcccagcggtagtgtcctggccgacgacggcacgttccttggcaatggcgcccttaacgcactgctgtccgaccacggcatcgatcacggtggccgcgtgggtgtctactgcggctcgggtgtcagcgcagctgtcatcgtcgcggcactggcagtgatcggccaggatgcggagctgtttccagggtcatggtcggagtggagttcggatccgacccgtcccgtcggccgtggcactgcatag

SEQ ID NO: 872 - DNA, 546 bp, Tuberculosis
atgatcgccgacgaaatccaatcggggctggcctgtacgggttacccgttcgcctgcgaccacgggggtgtgctgccagacatttacctgctcggcaagacacttggtggcggtgcggttccgttgtcggcgatggtcgcggaccgcgaaatcttcggcgtggtgcatcccggcgaacacgggtcgacgttcggcggcaatccgttggccgccgcgatcggtacccccgtggtttccatggtcgtctggggagaatgtcaagctcgctccgctaaattgggtgcgcatctgcatcagcgcctggcggacctgatcggcgatggtgcggtggccctgcgcggcctcggatggtgggctgacgtcgacatcgaacgggcgcttgccattggcacagacatgagcatgcggttggccgatcgcggtgtgctgttaaaagacacctacggcgccgccctgcggttcgcgccgccgttagtgatcaccgcgcaggagatcgactgcgcggttcgccggttcgccgacgcgctatgggaggcgggttcataa

SEQ ID NO: 873 - DNA, 429 bp, Tuberculosis
gtgccatccctaccggaccggctggcatcgatactgcgcgatgtccttcctgccgaggaggaacccgacggcgcgctgacggttcgccatgacggtacgtttgcctcgttgcgggtagtgagcatcgctgaggacctcgagctggtgtcccttacccagatcctggcgtgggatctgccgttgaccaagaggctcgccgagcaagtggccaagcaggcacgcgacatcaacttcggctcggtgagcctgcgggaaaaggtcagcgagaaggctgcgcggcgaagctctggtcggcccgcgtccaacaccgcggacgtgatgctgcgatacaactttcccggcaccggtttgaccgacgacgcgttgcgcacgttgatccttttggtgctggagacgggcgccacgatccgcagcgcgctcgttggctag

SEQ ID NO: 874 - DNA, 318 bp, Tuberculosis
atgatcttcaaaggggtgcgggaaggcaagccgtatcccgagcatggactgtcctatagggactggtctcagataccgccgcaacagatccggctcgacgagttggtcaccacgactacggtgctcgcgctggaccgcctgctgtcagaggactccacgttttacggtgaccttttcccccacgcggtgaagtggcgaggcaccacctatctcgaggacggcttgcaccgggcggtgcgtgcggccctgcgcaaccgcaccgtgctacacgcgcgagtgttcgacatggacgcgtcaccaggcgggcggcgtagctga

SEQ ID NO: 875 - DNA, 507 bp, Tuberculosis
atgaagatggtgaaatcgatcgccgcaggtctgaccgccgcggctgcaatcggcgccgctgcggccggtgtgacttcgatcatggctggcggcccggtcgtataccagatgcagccggtcgtcttcggcgcgccactgccgttggacccggcatccgcccctgacgtcccgaccgccgcccagttgaccagcctgctcaacagcctcgccgatcccaacgtgtcgtttgcgaacaagggcagtctggtcgagggcggcatcgggggcaccgaggcgcgcatcgccgaccacaagctgaagaaggccgccgagcacggggatctgccgctgtcgttcagcgtgacgaacatccagccggcggccgccggttcggccaccgccgacgtttccgtctcgggtccgaagctctcgtcgccggtcacgcagaacgtcacgttcgtgaatcaaggcggctggatgctgtcacgcgcatcggcgatggagttgctgcaggccgcagggaactga

SEQ ID NO: 876 - DNA, 1086 bp, Tuberculosis
atgtcgttcctgattgcttcgccggaggcgctagcggcgacagccacatatttgacaggtatcggttcggcaatcagcgcggcgaacgcggtcgcggccgccccgacaacagagatcctggcggcggggaccgacgaggtgtccaccgccatctcagcgctgttcggcgctcatgcccaggcatatcaggcgctcagcgcccacgtggcggcatttcacgaccagttcgtgcataccttgaccgccggtgccggctcatacatggccgccgaggccgccgccgcctcgcctctgcaggctttgcagctggagctgctcaacgccatcaatgcacccaccctggcgctgttgggacgcccgttgatcggcgacggcaccgatgcggcgccggggagcgggggggccggcggggccggcggcatcttgatcggcaacggcgggaccggcggcgccagcgacttagccgggaccggccgcggcggggtcggcggggcgggcggcgccggcgggctcttcggcatcggcggcgccggcgggggctgcgggtccgcggtggcgatcgggggtgacggcggggctggtggcgccggcggcgtgttcagcggcggcggcgccggcggggccggcgacgccatcgggggtagcggcggcgcgggcggcaccggtgggctgttgggtggtggcggcggcgcgggcggcgccggcggcgccggcggcaatggcgggggcgccagcaacagcgcaagtatcgggggtgacggtgggtccggcggcgcgggcggcatgctctacggtgccggcggcgtcggcggcaacggcggggccgcggtcgctatcgggggtgacggcggggccggcggcagggccggagcgatcggcaacggcggtgacggcggcaacggcgggacttccaacacccccggcggtagcggcggcgacggcggcaatggcgggaacgccggactgatcggcaacggcggtaacggcggcaacgccgagattgtcatctccggcggtagcgtcgccggcaccggtggcaacggcgggttgctgttgggcttcaacggcacgaacgggctgccgtag

SEQ ID NO: 877 - DNA, 672 bp, Tuberculosis
atgagagcgcggcgactggtgatgctgcggcatggacaaacggactacaacgtcggtagccggatgcagggccagctggacactgagttgagcgaacttggccgcacccaagcggtcgcggccgccgaggtgctgggcaagcggcagccgctactgatcgtatcgtcggacctgcgccgcgcatatgacacggcggtcaagctgggcgagcgcaccggccttgtggtccgggtcgacacccgattgcgggaaactcaccttggcgattggcagggcttaacccacgctcagatcgacgctgatgccccgggcgcccggttggcctggcgcgaggatgcgacctgggcgccgcacggcggggaaagcagggttgacgtggctgcccgaagtcggccgttggttgccgagttggttgccagcgaaccggaatggggtggcgctgacgagccggatcgcccggtggtgctggtagcccatgggggtctgatcgccgcgttgtcggcggcgctgctgaagttgccggtggccaactggccggctttgggcggcatgggcaatgccagttggactcagctgagtggccattgggccccgggctccgacttcgagagcatccggtggcgccttgatgtgtggaatgcttcggcgcaggtctccagcgatgtcctctag

SEQ ID NO: 878 - DNA, 636 bp, Tuberculosis
atgggtgggacgttcgaccccatccactacggccacctggttgccgccagcgaggtggccgacctgttcgatctcgacgaagtggtattcgtgcccagcgggcaaccctggcaaaagggtcgacaggtctccgccgccgagcaccgctacctaatgacggtgatcgccaccgcctccaatccccgattctctgtgagccgggtcgacatcgaccgcggcggacccacctacaccaaggacacgctggccgatctgcatgctttgcacccggactctgagctgtacttcaccaccggcgccgatgcgctagcttccataatgtcctggcagggctgggaggagctgttcgaattggcgcggttcgtgggggtcagccggcccggctacgagttgcgcaacgaacacatcactagcctgctgggtcagctggccaaggatgcgttgactctggtcgagatcccggcgctggccatttcgtcgaccgactgccgtcagcgcgccgagcagtcccggccgctgtggtacctgatgcccgacggcgtcgtgcagtatgtctccaagtgccggctctactgtggcgcctgcgacgcgggcgcgcgttcaacgaccagcctggccgctgggaatggcctatga

SEQ ID NO: 879 - DNA, 624 bp, Tuberculosis
atgctcgagaaggccccccagaagtctgtcgccgatttctggttcgatccgctgtgcccgtggtgctggatcacgtcgcgctggatcctcgaggtggcaaaggtccgcgacatcgaggtgaacttccacgtcatgagcctggcaatactcaacgaaaaccgtgacgacctgcccgagcaataccgcgaaggcatggcgagggcatggggaccggtacgggtggcgatcgccgccgagcaggcccatggggcgaaagtcctggacccgctgtacaccgcgatgggcaaccggattcacaaccagggcaaccacgaactcgacgaggtcatcacccagtcgctggcggacgccggtctgcccgcggagttggccaaggccgctaccagcgacgcttacgacaacgccctgcgcaaaagccaccacgccgggatggacgcggtgggcgaggacgtcggtacgccgacgatccatgtcaatggtgtggcgttcttcgggccggtgctctcgaagattccgcgcggcgaggaagccggcaagctctgggatgcctcggttaccttcgcttcctacccgcacttttttgagctcaagcggacccgcaccgagccgcctcagttcgactag

SEQ ID NO: 880 - DNA, 654 bp, Tuberculosis
gtggttgagcgtgggttgtggctccctgacccggctcaccgcgcggatctggccacgttcgtggatcacgcgcttcggctcgacgatgccgccgttatccgtattcgcgcgcggtctaccggattgctatcggcttgggtagcaacgggcttcgacgtgctggccagtcgggtggtggccggcaaggtgcgacccgacgatctgtcggtggccgcacggtcactcgcgcacggtctggccacaacggatgcctcgggctatgtcgatcccggttactcgatggactccgcgtggcggggtgggttgccgccggagtccggcttcacctatctcgacgacgtaccggcccgggtgatgttggacctggcgcaccgtggcgcgcggctggccaaggagcacgggagttcggctggtccgccggtatcgctgctcgatcaggaggtcatccaggtcagctcggccgatgtcgtcgttgggctacccatgcgctgtgtgttcgctttgaccgcaatgggtttccttccccagtccgcagaaacgatcagcgccgacgagctgatccgggtccggatatcgccggcgtggttgcgtctggacgcccgcttcggctcggtttatcggcatcgcggccacgcggcgctggtgctgcgctga

SEQ ID NO: 881 - DNA, 324 bp, Tuberculosis
gtggcgttgcgtagacgccatgagccagacggctggccattttcccagcgctcagaaaaaccgaatgcggtgcgccatgccgtcagatgcagcgccgtgagcgccgccgcgagcacggcgaacggcaccccagtgaactgggtcagtgggcgcgtgacgcgcgcaatgggcgtacaccgccagactcgtggcggcgtcgcgagtgtccatgccgactcgctgcggggtgcggttcttgtccacgggcagctgaggaactcgatccccatcagcgccaacgtccccgccagcggcgctaacacgaagtcgtctatagctcactag

SEQ ID NO: 882 - DNA, 2085 bp, Tuberculosis
gtgtcgttggtgatcgcgacgccgcagctgctggcaactgcggctttggatttagcgagtattggttcgcaggtgagcgcggctaatgcggccgcggcgatgccgacgacggaagtggtggctgcggctgccgatgaagtgtcggcggcgattgcggggttgttcggggcccatgctcggcagtatcaggcgctcagcgtacaggtggcagcgtttcacgagcagtttgtgcaggcgttgactgcggccgcgggtcggtatgccagcactgaggccgctgttgagcggagtctgctgggtgcggtgaatgcgcccaccgaggcgcttttggggcgcccgttgatcggaaacggcgccgacgggacggcacccgggcagcctggcgcggccggcgggttgctgtttggcaacggtggcaacggcgcggctggcgggttcggtcaaaccggcggcagcggaggcgcggccgggttgatcggcaacggcggcaacggcggggccggtggtaccggcgcggccggcggtgccggtgggaacggggggtggttgtggggcaacggcggcaacggcggtgtcggcggcaccagcgtggccgcaggcatcgggggtgcgggcggtaacggcggcaacgccgggctgttcggccatggcggcgccggtggtaccggcggcgccggcctcgccggggcaaacggggtcaatcccacgcccggccccgcggccagcaccggggacagcccggcagatgtgtccggcatcggtgatcaaaccggcggcgacggcggcacgggcggccatggcactgccggcacgccgaccggtggcaccggcggcgacggtgccaccgcgacggcaggctcgggcaaggccaccggcggtgccggtggtgacggcggtaccgccgctgccggtggcggcggcggcaacggcggcgacggcggagtcgcgcagggcgacattgcgagcgcctttggcggtgatggtggcaacgggtccgacggtgtagccgccggcagtgggggtggtagcggcggcgccggaggcggcgctttcgtacacatcgccactgccacctctaccggtggtagcggcggtttcggtggtaacggggctgccagtgccgcctccggcgccgacggtggcgcagggggagctggcggcaatggtggcgccggcgggttgctattcggtgatggcggcaacggtggcgccggtggcgcgggtggtatcggtggtgacggcgccacgggggggcccgggggaagcggcggcaacgctggcatcgcgaggtttgacagcccagaccccgaggcagaacccgatgtggtcggcggcaagggtggtgatggcggcaagggcggcagcggccttggcgtcggcggcgccggcgggaccggcggcgcgggcggcaacggcggcgccggcgggttgttgttcggcaacggcggcaacggcggcaacgccggggccggcggggatggcggcgccggcgttgccggtggggttggcggtaacggcggcggtggtggcaccgcgacgtttcacgaagacccggtcgctggtgtctgggcggtcggtggcgtaggtggtgatggtggctccggcggcagctcgcttggtgtcggcggggtgggcggagccggtggcgtgggtggcaagggtggcgccagcggcatgttgatcggcaacggcggcaacggtggcagcggcggagtcggtggggccggtggagtcggcggggctggcggtgacggcggcaacggcggctccggtggcaacgccagtacttttggcgatgagaactccatcggcggggccggcgggacgggcggcaacgggggcaacggcgcaaacggcggtaacggtggcgctggcggtattgccggcggtgcgggtgggtccggagggttcctcagcggtgccgcaggagtcagcggcgctgacggtatcggtggcgcgggcggcgcaggcggtgccggtggcgcgggcggtagcggcggtgaggcaggcgcggggggcctcaccaacggccccgggtcccctggcgtttccggcaccgaaggcatggccggcgcgcccggctag

SEQ ID NO: 883 - DNA, 222 bp, Tuberculosis
gtgcgaacgacacttgaccttgacgacgatgtgatcgccgcggcacgtgaacttgcctccagccagcgccgctcgctcggctcggtgatttccgaactcgcacgccgtggtctcatgcccggacgcgtcgaggctgacgacgggctgccggtgatccgcgttccagccgggaccccgccgatcacaccggagatggtccgtcgcgcgctcgatgaggactga

SEQ ID NO: 884 - DNA, 657 bp, Tuberculosis
atgagcgccccgggctggagccgagacgagatggccgcacgggtggccgcggagttcgaagacggtcagtatgtcaaccttggcatcggcatgcccaccctgattcccaaccacattcccgacggcgtccatgtcgtcctgcactcggagaacggcatcctcggcgtcggcccctacccgcggcgggaggacgtggatgccgatttgatcaacgcgggcaaggagacggtcaccacgctgccgggtgccgcattcttcagctcgtcgacttcgttcggaatcatccgcggtggccaccttgatgtcgcagtgcttggcgcgatgcaggtttcggtcaccggtgacctagccaactggatgatccccggcaagatggtcaagggcatgggcggcgcgatggatctggtacacggcgctcgcaaggtgatcgtgatgatggagcacaccgccaaggacggtagccccaagatcctagagcggtgcacattgccgttgaccggtgtgggctgcgtcgaccgcattgtcactgaactcgcggtcatcgatgtctgcgctgacggcctgcacctggtccagaccgctcctggcgtgtcggtcgacgaggtagtcgcgaagactcaaccgccccttgtgcttcgggacctggcgacccagtga

SEQ ID NO: 885 - DNA, 747 bp, Tuberculosis
atggacaaggtggtggccaccgccgcggaggcggtcgcagacatagccaacgggtcgtcgcttgcggttggtggattcgggctttgcggcatccccgaagcactgatcgcagcgttggtggatagcggtgtcaccgacctggaaacagtctcgaacaactgcggaatcgacggtgttggtctgggactattgttgcaacacaagcgaattcgccggacagtctcctcctacgtgggggagaacaaggagttcgcccgccagttcctcgcgggcgagctcgaggtggaactgaccccgcagggcacgctggccgagcggttgcgggccggagggatgggcataccggccttctatacaccggcaggggtcggtacccaggtcgccgacggcgggttgccgtggcgctacgacgcctcgggcggggtggcggtggtgtcgccggccaaggagactcgggagttcgatggtgtcacctatgtcctcgagcgggggatccggaccgacttcgcactggtgcatgcctggcagggggaccggcacggcaacctgatgtaccgccacgccgcggccaacttcaacccggagtgcgcatccgcaggcaggatcacgatcgccgaggtcgagcacttggtcgagccgggtgagatcgaccctgccaccgtacacaccccgggcgtgtttgtgcaccgggtggttcatgtgcccaaccccgccaagaagatcgagagggagacggtgcggcaatga

SEQ ID NO: 886 - DNA, 648 bp, Tuberculosis
gtgcaagacgaactggtgtggatcgactgcgagatgaccgggctcgatctgggttcggacaagctgatcgagatagccgccctggtcaccgatgccgatctgaacattctcggcgacggggtggacgtggtgatgcacgccgacgacgccgcgctgtcgggcatgatcgacgtggtcgccgagatgcactcgcggtcggggctgatcgacgaggtgaaggcatccacggtcgacctagcgaccgccgaggccatggtgctcgactacatcaacgagcacgtcaagcagcccaagaccgccccactggccggcaactcgatcgccaccgaccgcgcgttcatcgcccgcgacatgcccacgctggactcgtttctgcactaccgaatgatcgacgtcagctcgatcaaggaactgtgccggcgctggtatccgcggatctacttcggccagccgcccaaggggctgacgcaccgggcgctggccgacatccacgaatccatccgcgaactgcggttctaccgccgcaccgcgttcgtgccccagcccggcccttctaccagcgaaatcgcggccgtcgtcgccgagctttccgacggggcgggcgcgcaggaagaaacagattcggccgaggcgccccagagcggttaa

SEQ ID NO: 887 - DNA, 564 bp, Tuberculosis
gtggcgaccactgctgacttcaagaacgggctggtcctggtaatcgacggccagctgtggacaatcaccgagttccagcacgtcaaaccgggcaagggtccggcgttcgtgcgcaccaagttgaagaacgtgctctcgggcaaggtcgtcgacaagacgttcaacgccggggtgaaggtggacaccgccaccgtcgaccggcgcgataccacctacctttaccgcgacggctcggacttcgtgttcatggacagccaagactacgagcagcacccgctgccggaggccctggtcggggacgcggcacggttcctgctggagggcatgccggtgcaggtggcgttccacaacggcgtgccgctatacatcgagctgccggtgaccgtcgagctcgaggtcactcacaccgagcccggcttgcagggcgaccggtccagcgcgggcaccaagccggccacccttcagaccggagcccagatcaacgtgccgctgttcatcaataccggagacaaactaaaggtggattcgcgcgacggtagctacctgggccgggtcaacgcctga

SEQ ID NO: 888 - DNA, 408 bp, Tuberculosis
atgcgccgccggcggccaccgcacgtcaacgcacccactccgtgcgatcgcggtgatgtgcggccccccggatgccccgctagcatccctggcgtggaagtggctggcggcacccgggcccggctgcgggtcacagccgatggtttgcaggcgctggccgggcggtgcgcgaccctggccggcgaattgtcggccgcggtcgcgccgtcgggggcggtgttgtcgtggcaggccaacgcggtcgcggtgaacgccgcgcatgcccgcgcgggtgcggccgccgcggctgtgagcgcccgaatgcgggccaccgccgccgcgctggggcaggccgcccgccggtacgcgggccaggacaccgcagcggcggccgccctgggggcggtacgcccgtgggggacccactga

SEQ ID NO: 889 - DNA, 1722 bp, Tuberculosis
gtggcatcgtcttcggcgccggtgcaccctgcccgttacctgtcggtgttcctggtgatgctgatcggcatctatttgctggtgtttttcaccggggacaagcacaccgcccccaaactcggcattgacctgcagggcggcaccagggtcacgctgaccgcgcgcacaccggacggctcggccccgagccgggaagcgctggcacaggcgcagcaaatcatcagcgcgcgggtcaacgggctgggagtgtccgggtcggaggtggtcgtcgacggtgacaacctggtcatcacggtgcccggcaacgacggcagcgaggcacgcaacctcggacagaccgctcggctgtacatccggccggtgctcaactcgatgccggcgcagcccgcagccgaagaaccgcagccggcacccagcgccgaaccgcagccgcccggtcaacccgccgcaccgccgccagcccaatcgggggcgccggcttcaccgcaacctggggcccaaccgcggccctatccgcaggacccggcgccatcgcccaacccgacctcaccggccagcccgccgccggcgccgcccgctgaggcgccggccacggatccgcgcaaggatctcgccgagcgcatcgcccaggagaagaagctgcggcagagcaccaaccaatacatgcagatggttgcactgcaattccaggcgacccgctgcgagagcgacgacattttggccggcaacgacgacccgaaactgccgttggtgacctgctcgaccgaccacaagaccgcgtacctgctggcgccgtcgatcatcagcggcgaccagatccaaaacgccacctcgggtatggaccagcgcggcatcggctacgtcgtcgacctgcagttcaagggtccggcggccaacatctgggccgactacaccgccgcccatatcggcacccagacggcgttcaccctggactcgcaggttgtcagtgcaccgcagatccaggaagcgatccccggcggccgaacccagatcagcggtggggatccgccattcaccgcggcgaccgcacgccagctcgccaacgtcctcaagtacgggtcgctgccgctgtccttcgaaccgtcggaagcccaaacggtttcggcgaccttggggttgtcatcgctgcgcgcgggcatgatcgcgggtgcgatcggcctgctgttggtgctggtgtattcgctgctctactaccgagtgctgggactgctcacggccttgtcgctagtggcttctggctcaatggtttttgcgatcctggtgctcttgggccgatatatcaactacaccctagatctggctggtattgcgggcctgatcatcggtatcgggaccaccgccgactcgttcgtggtgttcttcgaacgcatcaaagacgagatccgcgaaggccgttcgttccggtcggcagtgccgcgcggttgggcgcgtgcccgcaagacgatcgtgtcgggcaacgccgtcactttcctggccgctgccgtgctgtactttctggcgatcggtcaggtgaaggggttcgcgttcaccctgggcctcaccacgatcctggacctcgtcgtggtgttcttggtgacgtggccgttggtgtatctggcgtccaaatcgtcgctgctggccaagccggcatacaacggcctgggagcggtgcagcaggtcgcacgcgaacgccgggccatggctcggacgggacggggatag

SEQ ID NO: 890 - DNA, 432 bp, Tuberculosis
atgagccgcaaccgcctgttcctggttgccggcagcttggcggttgccgccgccgtgtccttgatctctggaatcacgctgctgaacagggacgttggctcgtatatcgcctcgcactatcgccaagaatcccgtgacgtgaacggaacgcgatacctgtgcaccggatcgcccaaacaggtggccaccacgctcgtcaagtaccagaccccggcggcgcgcgcgtcgcataccgacaccgagtacctgcgttaccgcaacaacatcgtgacggtcggacccgacggcacctatccgtgcatcatccgcgtcgaaaacctcagcgccggatataaccacggcgcatatgtcttcctgggccctggattcacccctgggtccccgtcgggcggttcggggggcagcccgggcggtcctggcggcagcaagtaa

SEQ ID NO: 891 - DNA, 846 bp, Tuberculosis
gtgtcgatcgaagagatccttgatcttgagcaacttgaggtcaacatctaccgaggaagcgtgttcagccccgaatcgggcttcctgcaacgcactttcggtggtcatgtagccggccagtcgctggtgtcggcggtgcgcaccgtcgacccgcggtacatggtgcactcgctgcacggctattttcttcggcctggagatgccaaggagcgcacggtttttctggtcgaacgcatccgcgacggtggatcgttctgcaccaggcgggtcaacgcagtccagcacggggaaaccatattcagcatggcggcgtcgttccagaccgaacaggagggcattacccaccaagacgttatgccagcggcgccgccgcccgacggcctgccggggttgaactcgatcaaggttttcgatgatgccgggttccggcagttcgacgagtgggacgtgtgcatcgtgccccgggagcgcctgcggcttttgccgggcaaggcttcccagcagcaggtgtggcttcgccaccgtgacccgttgcccgacgacccggtgttgcacatctgtgcactcgcctacatgagcgacctcacgctgctgggatcggcacaagtcaaccacctcgatgtgcgcgaccagctgcaggtggcatcgctggaccatgcgatgtggttcatgcgacccttccgcgccgacgagtggttgctgtacgaccagtcgtcgccgtcggccagcggcggtcgtgcgctgactcggggcgagattttcacacggtccggggagatggtcgcggcggtcatgcaggaggggctgacccgccaccggcgcggtcaccggtcggtggggcagtga

SEQ ID NO: 892 - DNA, 363 bp, Tuberculosis
atgtccacgcaacgaccgaggcactccggtattcgggctgttggcccctacgcatgggccggccgatgtggtcggataggcaggtggggggtgcaccaggaggcgatgatgaatctagcgatatggcacccgcgcaaggtgcaatccgccaccatctatcaggtgaccgatcgctcgcacgacgggcgcacagcacgggtgcctggtgacgagatcactagcaccgtgtccggttggttgtcggagttgggcacccaaagcccgttggccgatgagcttgcgcgtgcggtgcggatcggcgactggcccgctgcgtacgcaatcggtgagcacctgtccgttgagattgccgttgcggtctaa

SEQ ID NO: 893 - DNA, 540 bp, Tuberculosis
atgctgcaccgcgacgatcacatcaatccgccgcggccccgcgggttggatgttccttgcgcccgcctacgagcgacaaatcccctgcgcgccttggcgcgttgcgttcaggcgggcaagccgggcaccagttcagggcatcggtccgtgccgcatacggcggacttgcgaatcgaagcctgggcaccgacccgtgacggctgtatccggcaggcggtgctgggtaccgtcgagagcttcctcgacctggaatccgcgcacgcggtccatacccggctgcgccggctgaccgcggatcgcgacgacgatctactggtcgcggtgctcgaggaggtcatttatttgctggacaccgtcggtgaaacgcctgtcgatctcaggctgcgcgacgttgacgggggtgtcgacgtcacattcgcaacgaccgatgcgagtacgctagttcaggtgggtgccgtgccgaaggcggtgtcactcaacgaacttcggttctcgcagggtcgccacggctggcgatgtgcggtaacgctcgatgtgtga

SEQ ID NO: 894 - DNA, 627 bp, Tuberculosis
ttgccatcgccagcaaccgcccgaccggacaccgccacggtgggagagcgtgtgcgcgctcaagttttatggggcgttttttggcatcatggcattcgcgacccgaaacccggaaagaggagggtggtgttgaaaatgggtaggcgtggtcccgcgccggcgccggcgcagttgaaactcctcggcggccgctcgccgggccgtgattctggcggccggcgggttacaccaccggcggcgttcgagcgtgttgcgccggaatgcccggattggttgccgccaggcgctaaagacatgtgggggcgcgtcgttcccgagcttgcggcattaaacctgctgaaggagtccgaccttggggtgctgacctccttctgcgtcgcctgggatcagctcatgcaggctgtaacagcctaccgtgaacagggtttcatcgcgacgaacgcccgcagccgacgggtgacggtgcatcctgccgtggccgcggcccgggccgcgacgagggacgttttggtgctcgcgcgcgaattggggtgcacgccaagcgctgaggcgaatttggctgctgtgctggcggcggcgggggaccccgacgacgacgagttcaacccgttcgccccagaccggtga

SEQ ID NO: 895 - DNA, 234 bp, Tuberculosis
gtggaggtgagggctagcgcccgcaagcacggcatcaacgacgacgccatgctccacgcataccgcaacgcgctgcgctacgtcgaactggaataccacggcgaagttcaactgctggtgatcggccccgaccaaaccgggcgccttttagagctggtcatcccagcagacgaaccaccccggattatccacgccaacgtactacgcccgaagttctacgactacctgaggtga

SEQ ID NO: 896 - DNA, 804 bp, Tuberculosis
atgacctcttctcatcttatcgacaccgagcagcttctggctgaccaactcgcacaggcgagcccggatctgctgcgcgggctgctctcgacgttcatcgccgccttgatgggggctgaagccgacgccctgtgcggggcgggctaccgcgaacgcagcgatgagcggtccaatcagcgcaacggctaccgccaccgtgatttcgacacccgtgccgcaaccatcgacgtcgcgatccccaagctgcgccagggcagctatttcccggactggctgctgcagcgccgcaagcgagctgaacgcgcactgaccagcgtggtggcgacctgctacctgctgggagtatccactcgccggatggagcgcctggtcgaaacacttggtgtgacaaagctttccaagtcgcaagtgtcgatcatggccaaagagctcgacgaagccgtagaggcgtttcggacccgcccgctcgatgccggcccgtataccttcctcgccgccgacgccctggtgctcaaggtgcgcgaggcaggccgcgtcgtcggggtgcacaccttgatcgccaccggcgtcaacgccgagggctaccgagagatcctgggcatccaggtcacctccgccgaggacggggccggctggctggcgttcttccgcgacctggtcgcccgcggcctgtccggggtcgcgctggtcaccagcgacgcccacgccggcctggtggccgcgatcggcgccaccctgcccgcagcggcctggcagcgctgcagaacccactacgcagccaatcacggtcgacacaatgcataa

SEQ ID NO: 897 - DNA, 411 bp, Tuberculosis
atgacgcgcccaaagctagaactgtccgacgacgagtggcgtcagaagctcaccccgcaggaattccatgtgctacgtcgcgccgggaccgagcggcccttcaccggtgaatacaccgacaccacaacagcgggcatctaccagtgccgggcctgtggcgccgaattgttccgcagcaccgagaaattcgagtcgcattgcggctggccgtcgttcttcgacccgaaaagctccgatgcggtgaccctgcgccctgaccactcgttggggatgacgcgtaccgaggtgctgtgcgcgaactgcgacagccacctgggccacgtgttcgccggcgaggggtatcccacgccaaccgacaagcgctattgcatcaactccatttcgctgcgcctggtccccggtagcgtgtag

SEQ ID NO: 898 - DNA, 633 bp, Tuberculosis
ttgacctccgccggcgacgatgcagagcgcagcgatgaggaggagcggcgcttgacctccgccgagccggccctattccgcgaggcagttgcggcgatgaacgctgtcaccgtgcggccggaaatcgaactcggccctatccgaccgccgcagcggctagctccgtacagctatgcgctgggagccgagatcaagcatcccgaactcgacgtcattccggagcgttccgagggcgacgccttcggccggctgatcatgctgtatgacccggacggctccgatgcatgggacggcactattcgcctggtcgcctatgtccaggccgacctggactcgagtgaagccgtcgaccccctgctgcccgaggtggcatggagttggctggtggacgcgctgacagcgcgcaccgaccaggtgagggccctgggcggcactgtcaccgccaccacatcggtgcgatacggcgacatctccgggccgccgcgcgctcaccagctggagctacgggcgtcatggacggcgaccacccccgatctgggcgcccatgtccaggcgttctgcgacgtcctggagcacgcggccggcctgccgccagccggggtcaccgacctgggctcgcggtcacgcgcctga

SEQ ID NO: 899 - DNA, 486 bp, Tuberculosis
gtgtctgggacgcgcctcgcgccgcacagcgtgcgataccgcgagcgattgtgggtgccctggtggtggtggccattggctttcgcgctagcggcgcttatcgcgtttgaagtaaacctgggcgttgcggccctacccgactgggtaccgttcgcaacgcttttcacagtcgcagccgggacgctgctatggctcggacgtgtcgaaattcgggtcaccgccggctcagcggatggagccggagtgaagctatgggccggaccagcgcatctgccggtagccgtgatcgcccgatcagccgaaatcccggccacggctaaatctgcggcgctgggccgacaactcgatccggcagcttacgtcctgcatcgggcctgggtggggcccatggttctggttgtcctcgacgaccccaacgatcccacgccgtactggttggtgagctgccgccacccggagcgggtgttgtcggcgctgcgcagctga

SEQ ID NO: 900 - DNA, 873 bp, Tuberculosis
gtgacacgacctgacaacgaacccgcgcggctgcgctctgtggccgaaaaccttgctgccgaggcggcggccttcgttcgcggtcgtcgggccgaggttttcggcatctccagggcgggcgacggcgacggcgcggtgcgcgcgaagagcagcccgaccgatccggtgaccgtggtcgacaccgacacggagcggctcttgcgtgatcggttggctcaacttcggcccggtgacccgattctcggggaggaaggtggtggtcccgccgacgtgacggctacaccctccgaccgggtcacttgggtgctcgaccccatcgacggcacggtgaatttcgtctacggcatcccggcgtacgcggtgtcgattggggcacaggttggcggcatcacggtggcgggcgcggtcgccgacgtcgccgctcgcacggtgtattcggcggcgacgggcctcggcgcacatctcaccgatgagcgggggagacatgtgttgcggtgcaccggtgtcgacgagttgtcgatggcgttgctgggtaccggcttcgggtactcggttcggtgccgcgagaagcaggcagaattgctggctcatgttgtgccgttggtccgcgacgtgcgtcggatcggttctgcggcgctggacttgtgcatggtagcggcgggtcggctggacgcctactacgagcacggggtgcaggtgtgggactgtgcggcaggtgcgttgatcgccgctgaggcgggggcccgcgtgttgttgtcaacgccgagagcgggcggcgcggggttggtggtggtggctgccgcgcccggaatcgccgacgagctgttggcggcgctacagcgattcaacggcctagagccgatcccggactga

SEQ ID NO: 901 - DNA, 429 bp, Tuberculosis
atgtcagctagccgcaccatggtctcgtccggatcggagttcgaatcagccgtcggctactcgcgcgcggtacgcatcgggccactcgtggtggtggccggaacgaccggcagcggcgatgatatcgccgctcagacgcgagacgctctgcgccgcatcgagattgcgctcggacaggccggcgcaactctggccgacgtggtccgtacccgcatctatgtgaccgatatttcccgctggcgcgaggtcggcgaagtgcatgcacaggctttcggcaagatccgtccggtgacgagcatggtcgaggttaccgcgctgattgcgcccggcctgctggtagagatcgaggccgacgcctacgtagggtcggcggttgcagaccgaaattcgggagccggcccgaaggacccgtcaccagccggtgggtag

SEQ ID NO: 902 - DNA, 1578 bp, Tuberculosis
atgtcatttgtgatcgcggcaccggagtttttaacggcggcagcaatggacttggcgagcatcggctcgacagtgagcgcggccagtgccgccgcatcagcccccacggtcgcgatcctggccgcgggcgccgatgaggtgtcgatagccgtcgcggcgctgttcggaatgcatggccaggcatatcaggccctcagcgtgcaggcatcggcgtttcatcagcaatttgtgcaggccttgaccgcgggcgcgtactcgtatgcctccgctgaagccgccgccgtgacaccgcttcagcaactagtcgatgtgataaatgcgcccttcagaagcgcgctcggccgccccctgatcggcaacggcgccaacggtaaaccggggaccggacaagacggcggggccggcggactcttgtacggcagcggcggtaacgggggatcagggctggccggctccggccagaagggcggtaacggaggagctgccggattgtttggcaacggcggggccggcggtgccggcgcgtccaaccaagccggcaacggcggcgccggcggaaacggcggcgccggtgggctgatctggggcaccgcggggaccggtggcaacggcgggttcaccacctttcttgatgccgctgggggtgccggcggggccggcggcgccggtgggctgttcggcgcgggcggggccggcggcgtaggcggcgccgccctcggcggcggcgcccaggccgccggtggcaacggcggtgcgggcggggtcggtgggctgttcggcgccggcggtgccggcggcgccggcggcttcagcgacaccggtgggaccggcggggctggcggggccggcgggctgttcggcccgggcggcggctcgggcggcgtcggtggcttcggcgacaccggtgggaccggcggcgacggcggcagcggcgggctgtttggcgtcggcggggccggcgggcacggtggcttcggcagtgctgccggcggcgacggcggcgcgggcggcgccggcggcacggtcttcggctcgggcggggccggcggtgcaggcggagtcgccactgtcgctggccacggtggtcacggcggtaatgccggcctgctatacggcaccggtggggccggcggagccggcgggttcggcgggttcggcggcgacggcggcgacggcggtatcggcgggttggtcggttctggcggcgccggcggcagcggcggcaccggtaccctaagtggtggtcgcggcggggccggcggtaacgccggcacgttctacggttccggcggcgccggcggcgccggcggggagagcgacaacggcgacggcggaaacggcggcgtgggcggcaaggccgggttggtcggcgagggcggcaacggcggcgacggcggtgccacgatagcaggaaagggtggtagcggcggtaacggcggcaacgcctggctgacgggccagggcggcaacggcggcaacgccgcatttggcaaagccgggactggcagcgtcggcgtcggtggcgccggcgggctgctggagggccagaacggcgagaacggattgctgcctagctga

SEQ ID NO: 903 - DNA, 834 bp, Tuberculosis
gtgctcgtcgacgagctcggggtcaagattgtgcacgcgcagcatgtgccggcgccataccttgttcagcgcatgcgagaaatacacgaacgggatgagaatcggcaacgtcatgctcaagtggacgtccagcgacgtcgggatcagccagaacggggccagcaccagcaccgccggaaccgcgacgcggatcatcatccggatggccgcacccttgccggccagatcgttgcgcacccagtctcgcatcgagtccggcagccgcgccccgtagcaatagcggatgtactgccacgggttgggccgcgggcggattgcgttgtcgctcattcgctacagggtagcccgcggcgacgagaacgccgacgcggtcagaccgcgcaccagcgccttggacgccgaagtggtaatgccatagcgtgcccgttgtacctcgaaaatgccgcaggcccagaaccggatacgaagcgggccgaaggtcggcgtttcggtgcgttcggtggcggggatctgcggtggatggccgaccgggtgccgcgccaaggcagcggccggcgcgggttaggtagccgatccggtgcgggtgtgccacaaggcgctgacgcacgcggttggcggcatacggcggacggagttccacgagttggtcagcccgcgattcggcgcggcgtaccgggcttttggtgctggttggaccatgtgctgaccggtttcggtgggcgcaatgccatctgcgcgatcgaggacggggttgagccccgcgtcgcgtggtgggcgttgtgcaccgatttcgacgtgcctcggtcgatgggccgccgcacgcccggtggctga

SEQ ID NO: 904 - DNA, 753 bp, Tuberculosis
gtggccgagaccgcgccgctgcgcgtgcaactgatcgccaagaccgacttcttggccccacccgacgtgccctggaccaccgacgccgacggcggacccgcgctggtcgagttcgccggccgggcctgctatcagagctggtccaagcccaatcccaagaccgccaccaacgccggctacctccggcacatcatcgacgtcggacatttctcggtgctagagcatgccagcgtgtcgttctacatcaccgggatctcgcgatcgtgcacccacgagctgatccgccaccggcatttctcctactcgcagctctcccagcgctacgtacccgagaaggactcgcgggtcgtcgtgccgcccggcatggaggacgacgccgacctgcgccacatcctgaccgaggccgccgacgccgcccgcgccacctacagcgagctgctggccaagctggaagccaagttcgccgaccaacccaacgcgatcctgcgccgcaagcaggcccgccaagccgcccgcgcggtgctgcccaacgccaccgaaacccgcatcgtggtgaccggcaactaccgggcctggcggcacttcatcgcaatgcgggccagcgagcacgccgacgtggaaatccggcgactggccatcgaatgcctgcgccagctcgccgccgtggcccccgcggtgttcgccgacttcgaggtgaccaccctggccgacggcaccgaggtggcgaccagcccgttggcgaccgaagcctga

SEQ ID NO: 905 - DNA, 276 bp, Tuberculosis
atgagtgatggatggaaaaccttgcggttcggggaagtccttgagctgcagcgaggacatgatcttcctgcggcgtcgcggggatctggaacggtacctgttatcgggtcattcggggtgaccggtatgcatgacacagctgcgtacgatggtcccggtgtagccatcggcaggagcggtgcggcgattggtaccgcaactttcgttgcgggtccgatctggccgctggacacttgcctatttgttcgcgacttcaagggcaacgatccccgttag

SEQ ID NO: 906 - DNA, 420 bp, Tuberculosis
atgagcgccgcgactgctgcgtgggaccgccgggcggccgtcgtcgtaggaggcgtcgccgaacccgggtcggccggcccgatcgccggtgccgaccgcaagcggctgatctcgcgaatccaagtgcggcagctggattcggcggcagtggcggccaaacgccggcacttgtattacgtgcggccccttgacggacacccggttgcgcgggtggaccgcaaaaccgaccgcgccgcggacagcttgcccgtggcgggcgtgcttggcgaactcgacataccgccggtcacggttgccgaggggttggccggcgagctggcgtcgatggcgtcgtggctgggattgggggggatcgccgtgtccacccggggtgatctggctggggaactgtgcgcggccaccaagcggactaacggatga

SEQ ID NO: 907 - DNA, 564 bp, Tuberculosis
atgcggtggccgacggcgtggctgctggctctggtgtgtgtgatggcgactgggtgcggacccagtggccacgggacgcgggccggcgaggaggggccgttgagcccggagaaggtcgccgagctggagaacccgttgcgcgccaagcccccgctggaggacgccaaggaccagtaccgggcggcggtgacccagctggccaacgccatcacggccctggtgcccggcctgacgtggcgaacggatatggacacctggaccggctgcggtggtgagtatgaatggaccagggccaaagcggcgtatttcatgatcgttttcagtggaccgatccccgacgacaagtggctgcaggccgtgcagatcgtcaaggacggtgtcgaacagttcggtgccaccggctttggggtgatgaagaacaagccggccgaccacgacgtgtacttcgccggtcatggcggcgtcgagttcaaatgctcgacccagaaggcggcggtcctcaccgcacagtcggactgccggatcagccggaccgacaccccaaaaccctcgccgaccccgtag

SEQ ID NO: 908 - DNA, 327 bp, Tuberculosis
gtgtttcagatcagtccggagcagtggatgcactcggcggcgcaggtgaccacgcagggtgagggtctggccgtcggacatttgtcgtcggactatcggatgcaggccgcccagttcggctggcagggcgcctcggcgatggcgctcaacgccaagatggacgactggttggacgcgtcgagggcgctgctgaccaggatcggtgatcacgcattcgggctgcaggaggccgctatccagcatgcggcggcggaggcggagcgggcgcaggcgctcgcccaggtgggtgtttccgccgacgtcgtagctggtccgcgtggggtgtga

SEQ ID NO: 909 - DNA, 630 bp, Tuberculosis
ttgtacactcccggcaagggaccgccgagggcagggggtgtcgtgttcaccagggtgcggctgatcggagggctcggtgcgctgacggcagcggtggtggtggtgggcacggtgggctggcagggcatccccccagcgccgaccggcggcgacgcggtccagctgcgatcgaccgcggcgcccatgtccaccacgatgaagagcccgatcgtggcgaccaccgaccccagcccgtttgacccgtgccgagacatcccgttcgacgtcatccagcggctcggattggcctacacgccaccggaagccgaggaggggctgcgctgccacttcgacgcgggtaactatcagatggccgtcgagccgatcatctggcgcacctacgcccagaccctgccccccgacgcgatcgagaccacgatcgccggccaccgcgccgcgcagtactgggtgcggaagccgacgtatcacaacagcttctggtactcctcttgcatggtgaccttcaagaccagctacggggtgatccagcagtcgctgttctactcgaccgtctactccgagcccgacgtggactgcccgtcgaccaacctgcagcgggcaaacgacctcgtcccctactacaggttttag

SEQ ID NO: 910 - DNA, 1848 bp, Tuberculosis
atgttgtatgtagttgcgtcacccgacttgatgaccgcggcggctaccaatctggcggagattggttcggcgatcagcacggcaaatggtgcggcggcactcccgactgttgaggtggtggccgcggccgccgacgaggtgtccacgcagatcgcggctctattcggagcgcatgccaggagctaccaaaccctcagcacccaggcagcggcgtttcatagtcggtttgtgcaggcgttgaccacggccgcggcttcctacgccagcgtagaggccgccaacgcgtcgccacttcaggttgcgctagacgtgattaatgcgcccgcccagacactgctcggacgtccgctaattggtaacggcgccgacggatcgacaccggggcaggccggcgggcccggcgggttgctgtacggcaacggcggtaatggcgccgccggtgggcccaaccaggccggcggcgccggcggcaacgccggcttgatcggcaacggcggggcgggcggcgccgggggtgttggcgcggtcggcggtaaacgcggcacgggcggcctgctattcggcaacggcggggccggcgggcaaggcgggctcggcctcgcaggtatcaacggcggcagcggcgggcagggaggccacggtggcaacgccatcctgttcggccagggcggtgccggcgggccaggtggcaccggcgccatgggcgtcgccggcaccaatcccacccccatcggcaccgcagcgcctggcagcgacggcgtaaatcagattgggaacggtggtaacacggacctcaccggcggcgccggtggcgacggcaatgccggcagcaccaccgtgaacggcggcaacggcggtaccggcggcgcagctaggaactcatctggtggtaccggtaactcctttggtggtgccggcggcgccggaggcgacggcgccaacggcggcgacggtggcgctggcggggaagccctcaccgaaggcggtgccaccgccgttagtggtgctggtggtaagggaggtaacgccgaggcttccggcggcgccggcggcaacggcggcaaaggtggctttgctcaggccaccaccagcgtgaccgggggtaacggcggtaacggtggcaatggccacgacagtaacgcgccgggcggcgctggcggcagcggtggcgtcggcggtgacggcggccgtggcggcctgctggccggcaacggcggcaccggcggtgccggtggcaacggcggtaccggtggcgccggtgcccccggcggtgccggcggcgccggcggcaaagccgacatcgccaacagcctcggcgacaatgccaccgtaaccgggggcaatggcgggacaggcggagacggcggcagcgcgctgggcaccgggggggctgggggtgccggaggtctaggtggtcacgggggtgcaggcgggctgctgattggcaacggcggcgccggtggcgctggcggcctcggcggtgcgggcggcgccggcggtgcgggcggtgagggcggtgccggcggcgccggaggcgaagctattcccggcggggcgtccaccaactccgccggcggtgacggaggggcgggcggtactggcggcaatggcggtgacggcggtgccggcggagcccccggcctcggtggcgcgggcggggccggcggatggttgatcggccagtcgggcagcaccggcggcggtggcgccggcggtgccggtggtgccggaggtgccggtggcgcgggcggcagcggcggtgcgggtggccatggcgacactacctccggcaagaacggttcgtctggcaccgcgggcttcgacggcaaccccgggcagcccggctga

SEQ ID NO: 911 - DNA, 864 bp, Tuberculosis
gtgaacgaggcgctgatcggtttggcgttcgccgccgggttggtggctgcgctgaacccatgcgggtttgccatgttgccggcctacctgctgttggtggtgtatgggcaggattcggcgggccggacggggccgcttagcgcagtgggccgagcggcagccgccacggtcgggatggcgctgggcttcttgacggtgttcggcatcttcggagccctgaccatttccgcggccacggcggtgcagcgatacctgccctatgccacggtgctgatcggtctggcgctcatcgccctcggcgggtggctgctgttgggacgagggctgacggcgttgacgccccgatccctcggcgtgcgttgggctccaacggtacggctgggttccatgtatggctacggcatcagctatgcggttgcttcgctgtcatgcaccatcgggccgtttctcgcggttaccggggcaggcctgcggggcggttcggtcgtcgggagcgtagcgatctatctggcttatgtcgcgggcctgaccctcgttgtcggcgtgcttgccgtcgcggccgcgaccgcgagctcggcgctggccgaccgcctacggcgaatcttgccgttcgtcaaccggatcagtggcgcgctgctggtggtggtcgggctgtacgtgggttactacggtctctacgagctgcgcctgattgccggtgtcggggcgaatccccaggatgcggtgattgccgcggccggccgcctgcaaggtgccctggctggctgggttaaccagcacggtgcatggccttgggcggtgttgctggttgtgctggtggtcggtgccttcgccggtacctggtttcggcgggtgcggcgctga

SEQ ID NO: 912 - DNA, 558 bp, Tuberculosis
atgattgatgaggctctcttcgacgccgaagagaaaatggagaaggctgtggcggtggcacgtgacgacctgtcaactatccgtaccggccgcgccaaccctggcatgttctctcggatcaccatcgactactacggtgcggccaccccgatcacgcaactggccagcatcaatgtccccgaggcgcggctagtcgtgataaagccgtatgaagccaatcagttgcgcgctatcgagactgcaattcgcaactccgaccttggagtgaatcccaccaacgacggcgcccttattcgcgtggccgtaccgcagctcaccgaagaacgtcggcgagagctggtcaaacaggcaaagcataagggggaggaggccaaggtttcggtgcgtaatatccgtcgcaaagcgatggaggaactccatcgcatccgtaaggaaggcgaggccggcgaggatgaggtcggtcgcgcagaaaaggatctcgacaagaccacgcaccaatacgtcacccaaattgatgagctggttaaacacaaagaaggcgagctgctggaggtctag

SEQ ID NO: 913 - DNA, 420 bp, Tuberculosis
atgggtctagccgatgacgccccgctgggctatctgctctaccgggtgggagccgtactgcggccagaggtttccgctgcgctcagtccactcggcctgacgctgcctgagttcgtctgcctgagaatgctttcgcagtcaccgggactatccagcgccgaattggcccggcacgcaagcgtcacaccgcaggcgatgaacacggtgttgcgcaagctggaagatgccggtgcggtggcccggcccgcatcggtgtcttccgggcgttcgctaccggctacattgaccgctcgaggccgagccctggcgaagcgcgccgaggccgtcgtacgcgccgccgatgcccgcgtcctggccaggctgaccgcgcctcagcaacgcgagttcaaacgaatgctggagaagctcgggtccgactag

SEQ ID NO: 914 - DNA, 870 bp, Tuberculosis
atgcccgagctgcccgaagtcgaggtggtgcggcgcggcttgcaggctcacgtgaccggccggaccatcaccgaggttcgggtgcaccacccccgcgctgtgcgccgccacgatgccgggcccgcggatctgacggcgcggctgcggggagcgcggatcaacggaaccgatcggcgcggcaagtacctgtggttgacactcaatacggctggggtccataggccgacggacaccgcactcgtggtgcacctgggcatgagtgggcagatgctgctcggggcggtgccgtgtgccgctcacgtccggatttccgcgctgctcgacgacgggaccgtgctgagcttcgctgaccaacggaccttcggagggtggctgcttgccgacctggtgacggtggacggcagcgtggtaccggtgccggtcgcccacctggcgcgcgacccgcttgacccgcggttcgattgtgacgctgtagttaaagtgttgcggcgcaagcattccgaactcaagcgccagctgctggatcagcgggtggtgtcgggaatcggcaacatctatgccgatgaggcgctgtggcgggccaaggtgaacggcgcccacgtcgccgccacactaaggtgccggcgtctgggagcggtcctgcatgccgccgccgacgtgatgcgcgaagcgctggcgaaaggtggcacctcgttcgactctttgtatgtcaacgtcaacggcgagtcgggctacttcgagcggtcgctggacgcttatggccgcgaaggcgaaaactgtcggcgctgcggcgcggtgatacgccgggagaggtttatgaaccgctcgtcgttctactgcccgcgatgccagccgcggccccgaaagtag

SEQ ID NO: 915 - DNA, 786 bp, Tuberculosis
atgctggcccgtcacggaccacgctatggtggctcggtgaacgggcactcagacgacagtagcggcgacgcgaagcaagccgcacccacgctgtatattttcccgcatgccggcggcaccgcgaaagactatgtcgcattttcccgagaattttccgccgacgtaaagcggattgctgtccaataccccggccagcacgatcgttctggcctgccaccgcttgagagtattcccaccctcgctgacgaaatctttgcaatgatgaaaccgtcggctcggatcgacgatccggtggcattctttgggcacagtatgggcggaatgctagccttcgaagtagcgttgcgataccaatcggcgggccatcgagtcctggcattctttgtgtcggcctgctcagcaccgggtcatatcagatacaagcagctccaagatttatcagatcgcgagatgttggacttgttcacccgaatgacaggaatgaatccagatttctttaccgacgacgaatttttcgttggagcgctacccacgttgcgagcggtccgagccatcgccggttattcctgcccaccagagacgaagctctcgtgtccgatttatgcctttatcggagataaagattggatcgcaacgcaagacgacatggatccgtggcgcgatcggacgacggaagagttctctatccgtgtattccctggggatcacttctacctcaacgacaatttgccagagctagtcagcgacatagaagacaaaacactccaatggcatgatcgagcttag

SEQ ID NO: 916 - DNA, 486 bp, Tuberculosis
atgacgggcgcggtatgcccagggtcatttgacccggtgacgttaggccacgtcgacattttcgaacgcgccgcagcccaattcgacgaggtggtggttgccatcctggtcaaccctgcaaagacgggcatgttcgacctcgacgagcggatcgcgatggtcaaggagtcgacaacgcacctgcccaatctgcgcgtgcaggtcgggcatggcttggtggtcgactttgtcaggtcttgcgggatgaccgcgatcgtgaaggggctgcgcaccggcaccgacttcgaatacgagctgcagatggcgcaaatgaacaaacacattgccggtgtggacacctttttcgtcgcgaccgcgccacggtattcgttcgtgtcgtcctcactggccaaagaagtcgcgatgctgggcggtgacgtgtccgagttgctgcccgaaccggtgaatcgccggctgcgggacaggctcaacaccgaacggacctag

SEQ ID NO: 917 - DNA, 567 bp, Tuberculosis
ttgacccggatcatcggcggtgtcgccggaggccggcgcattgccgtcccaccacgcggaaccagacctaccaccgatcgggtgcgcgagtcgctattcaacatcgtgactgcgcggcgggatctgaccggtctggcggtgttggacctctatgcgggttccggcgccctggggctggaggcgttgtcgcggggagcggcgtccgtgctgttcgtggagtccgaccagcgcagcgcggccgtcattgcgcgcaacatcgaggccctaggtctctccggtgcgacgctgcgccggggcgcggtggcggccgtcgtggcggccgggaccacgtccccggtggatctggtgttggccgacccgccctacaacgtcgactccgccgacgttgacgccatcctggccgcactgggcaccaacggctggacgcgcgagggaaccgtagcggtggtggagcgtgcgaccacgtgcgcgccgttgacgtggccggagggctggcgccgatggccccagcgtgtttacggcgacacccgtttggaactggccgaacggctttttgccaacgtgtag

SEQ ID NO: 918 - DNA, 714 bp, Tuberculosis
atgaaccgcagaacgctactgtggctgtcggcgatcgcggcgctggcgctggtggtcgcgtatcagacgctgggatcatcggcgggcaggcacgctgacgagttcgccgcccgcgctggcgtgccaaccgtgcaacccggtgccgacgtgctcgccggcatcgccgtgctacccaaacggatccaccgctacgactaccgcaggtccgcattcggtcacccctgggacgatcgcaatgacgcgccgggagggcacaacgggtgcgacacccgcgacgacatcctcgaccgggatctggtcgacaagacatatgtgtcgatcaagcggtgtccgaatgcggtggccaccggcaccctgcgcgatccgtacaccaacaccaccgttgccttccaacgcggcgccagtgttggccaatcggtccagatcgaccacatcgttccgctctcgtatgcctgggacatgggcgcctatcggtggccgaactccgagcgaatgcgcttcgccaacgatccggccaacctgctggccgtgcaggggcaggcaaatcaggacaagggcgattcgccaccggcccaatggatgccacccaacaaggccttcgcctgtcagtacgcgatgcaattcatcgccgtgctgcgcggctattcactgccagtggatcagccatcgtccgacgtactgcgtcaggccgcggccacctgcccgacgggctag

SEQ ID NO: 919 - DNA, 966 bp, Tuberculosis
atggcgggcgccaaacatgctgggagaatcgtcgcgatcaccaccgcggcggcggtgatactggcggcgtgcagttcgggctccaagggtggagcgggcagcggccacgccggcaaagctcgttcggcggtgaccaccaccgatgccgactggaagccggtggccgacgcgctgggacgtagcggcaagctcggagacaacaacaccgcgtatcggatcaacctgccgcgcaatgaccttcacatcacgtcctacggtgtggacatcaaaccggggctgtcgttgggcgggtacgcggcattcgcccgatacgacaacaacgaaacgctgctgatgggcgacctcgtgatcaccgaggaggagttgcccaaggtcaccgatgcgttgcaggcgcatggtatcgcccagaccgcactgcacaagcatctgctgcagcaagacccgccggtgtggtggacccacattcacggcatgggtgatgccgcccgactggcccaaggactcaaggcggcgttggatgccacaacgatcggcccgcctaccccaccgccggcacggcaaccaccggtcgacatcgacgtcgccggcgtcgaccaggcgttgggccgcaagggaacccaagatggtgggctgatgaagtacagcatcccccgcaaagacaccatcatcgaggacgggcacgtgctgcccgcagtgtcgctgaacctgacgacggtgatcaattttcagccggtgggccgcggtcgcgcagcgatcaacggcgatttcatcctgatcgcccccgaggttcaggaggtcatccgggcaatgcgtgccggcaacatcacgatcgtggaactgcacaaccatgggctgaccgaagagccccgcctgttctacatgcattactgggccgtcgacgacgcggtcaccctggcgcgggcgctgcgcccggcgatggatgccaccaacctgcagtcgtcataa

SEQ ID NO: 920 - DNA, 1002 bp, Tuberculosis
atgttctacgacgacgacgcagacctgtcgatcattcagggccgcaaggttggtgtgatcggctacggcagccaggggcacgcgcactcgctaagcctgcgcgactcgggtgtgcaggtgcgcgtcgggctgaagcagggttcgcggtcgcggcccaaggtagaagagcagggcctggacgtcgacactcccgccgaggtcgccaaatgggccgatgtggtcatggtgttggcccccgacaccgcccaggccgagatcttcgcaggagacatcgaacccaacctcaagcccggtgacgcgctgttcttcggtcacggactcaacgttcacttcggcttgatcaagccgcccgccgacgtcgccgtcgcgatggtcgccccgaagggaccgggtcatttggtgcgccgccagttcgtcgacggcaagggtgtgccgtgtttggttgcggtagagcaggatccgcgaggcgacggcttggcgctggcgctgtcgtatgccaaagcgatcggcggcacccgggccggcgtcatcaagacgacgttcaaagacgagaccgaaaccgacctgttcggtgagcaaacggtgttgtgcggcggcaccgaggaattggtcaaggccgggttcgaggtcatggtcgaagccggctaccccgcggaattggcctacttcgaggtgctgcacgagctgaagctgatcgtcgacttgatgtacgagggtggcctggcgcggatgtactactcggtgtcggacaccgcggaattcggcggctacctctcaggcccgcgcgtcatcgatgccggcaccaaggagcggatgcgcgacatcctgcgggagatccaggacggtagctttgtccacaagctggtcgccgacgtcgagggcggcaacaaacagctcgaagagttgcgccggcaaaacgccgagcaccccatcgaggtcgtcggcaagaaactccgcgacctgatgagctgggtggaccgcccgatcaccgagacggcctag

SEQ ID NO: 921 - DNA, 801 bp, Tuberculosis
atgacgaacatcgtggtcctgatcaagcaggtcccagatacctggtcggagcgcaagctgaccgacggcgatttcacgctggaccgcgaggccgccgacgcggtgctggacgagatcaacgagcgcgccgtggaggaagcgctacagattcgggagaaagaggccgccgacggcatcgaagggtcggtaaccgtgctgacggcgggccccgagcgcgccaccgaggcgatccgcaaggcgctgtcgatgggtgccgacaaggccgtccacctaaaggacgacggcatgcacggctcggacgtcatccaaaccgggtgggctttggcgcgcgcgttgggcaccatcgagggcaccgagctggtgatcgcaggcaacgaatcgaccgacggggtgggcggtgcggtgccggccatcatcgccgagtacctgggcctgccgcagctcacccacctgcgcaaagtgtcgatcgagggcggcaagatcaccggcgagcgtgagaccgatgagggcgtattcaccctcgaggccacgctgcccgcggtgatcagcgtgaacgagaagatcaacgagccgcgcttcccgtccttcaaaggcatcatggccgccaagaagaaggaagttaccgtgctgaccctggccgagatcggtgtcgagagcgacgaggtggggctggccaacgccggatccaccgtgctggcgtcgacgcccaaaccggccaagactgccggggagaaggtcaccgacgagggtgaaggcggcaaccagatcgtgcagtacctggttgcccagaaaatcatctaa

SEQ ID NO: 922 - DNA, 549 bp, Tuberculosis
atggctcactcgatcgttcgcacgctgctggcctcaggtgccgccacggccctgatcgccattcccacagcctgctcgttttcgatcggaacgtcgcactcgcactcggtgagcaaggccgaggtcgcccggcagatcaccgccaagatgacagacgccgccggcaacaagcccgaatcggtgacgtgcccaagcgatctcccggcagaggtcggggccgagctgaattgcgaaatgaagatcaaggaccgcacgttcaacgtcaacgtcaccgtgaccagtgtcgacggtagcgacgtcaagttcgacatggtggagaccgtcgacaagaaccaggttgccaacatcatcagcgacaaactgttccagcgggtgggcgccaggcccgattcggtgacctgccccgacaatctaaagggcgtcgagggagccaaactgcggtgtcgactgaccgacggcagcaaaacgtatggcatctcggtgattgtcaccagcgttgacgccggcgatgtcaacttcgatttcaaggtcgatgaccaccccgagtag

SEQ ID NO: 923 - DNA, 1722 bp, Tuberculosis
ttgacagccgaagcgcccccgctgggagaactcgaagccattcgtccttacccggcccgcaccggtcccaaggggagcctggtctacaagctgatcaccaccaccgatcacaagatgatcggcatcatgtactgcgtcgcgtgcataagctttttcttcatcggtggcctgctggcgttgttgatgcggaccgagctggccgcacccggtctgcagttcttgtcgaatgagcagttcaaccagttgttcaccatgcacggcacgatcatgctgctgttctatgccacgccgattgtgtttggtttcgccaacctggtgctgccgctgcagatcggcgcacccgacgtggccttcccccggctgaacgccttttcgttctggctgttcgtatttggcgccaccatcggggcagccggcttcatcactccgggcggggccgcggacttcgggtggaccgcctacacgccgctgaccgacgccattcactcgcccggcgccgggggcgacctgtggatcatgggtttgatcgttgcgggtctgggcacgatcctgggcgcggtcaacatgatcaccaccgtggtgtgcatgcgcgcacccgggatgacgatgttccggatgccgatcttcacctggaacatcatggtgacgtccatcctgatattgattgcgttcccgctgctcacggcggcattgttcgggctggccgccgaccggcatctgggagctcacatctatgacgccgccaatggcggagtcctgctgtggcagcacctgttttggttcttcggccaccccgaggtctacatcatcgcgctgccgtttttcgggatcgtctcggagatcttcccggtgttttcccgcaagccgatcttcggttacaccacgctggtttatgcgacgctgtcgatcgccgcgttgtcggtcgcggtatgggcgcaccacatgttcgcgaccggagccgtcctgcttcccttcttctctttcatgacgtatctgatcgcggtgccgaccgggatcaagtttttcaactggatcggcaccatgtggaaggggcaattgacctttgaaaccccgatgttgttttcggtgggcttcatggtcaccttcttgctgggcggactcaccggtgtgctgctggccagcccgccgctggacttccacgtcaccgatagctatttcgtggttgcacactttcactacgtgctgttcggcacgatcgtgttcgccaccttcgccggcatctatttctggttccccaagatgaccggccggctgctcgacgagcggttgggcaaactgcacttctggttgacgttcatcggttttcacaccacgttcctggtgcagcactggttgggcgacgagggtatgccgcgtcgctacgccgactacctacccaccgacggcttccagggtctcaacgtcgtctcgacgatcggggccttcatcctgggtgcgtcgatgttcccgttcgtgtggaacgtcttcaagagctggcgctacggcgaggtggtcaccgtcgacgacccgtgggggtacgggaattcgctggagtgggcgacaagttgtccgccgccgcggcacaacttcaccgagctgcctcgcatccgctccgagcgtcccgcgttcgaactgcactacccgcatatggtggaacgccttcgcgccgaggcccacgtcgggcgtcatcatgacgagcccgccatggtgacttcgagctga

SEQ ID NO: 924 - DNA, 864 bp, Tuberculosis
atgttgcagaggggagccggacagtatttcgcgggtaagcggtgctttgtcaccggcgcggccagtggcatcggtcgcgcgaccgcgttgcgcctcgcggcgcaaggtgccgagctgtatctgaccgaccgcgaccgtgatggcttggcgcaaaccgtgtgtgacgcccgtgcactcggcgctcaggtgcccgagcatcgagttctggacgtctccgactaccaggacgtggcggcattcgcggccgatatccacgcccgtcatcccagcatggacgtggtactaaacatcgccggtgtgtcggcctggggcaccgttgaccagctcacgcacgatcagtggagcaggatggtcgcgatcaatctcatgggcccaatccacgtcatcgagaccttggtcccaccgatggtcgccgccggtcggggcgggcacctggtcaatgtgtcctcggcggccgggctggttggcttgccgtggcatgcggcctatagcgctagcaagtacgggttgcggggactttctgaggtgctgcgcttcgatctggcccggcacggcatcggggtgtcggtcgtggtgcctggcgccgtcaagaccccgctggtcaatacggtcgagatcgccggagtggatcgcgacgacccgagggtcaaccgctgggtcgaacggttcagtggtcacgccgtgacgccggagaaggcggccgacaaaattttggccggggtcacaaggaacagatacctggtctatacgtcggcggacatccgggcgctgtatgcgttcaagcgatatgcgtggtggccatacaccctggtgatgcgacgagtcaacgtgttcttcacgcgcgcgcttcggcccgggccatag

SEQ ID NO: 925 - DNA, 411 bp, Tuberculosis
ttgctgacggtcggcgtcgggataggcgcggccatcctcctcgggtggttcacgttagcgcaccggcacccggaccagcctggggcggccgcgacaccaccccctgcggggctaacaacacggtccgcgcccaccgccgccccgccgtcaacgctgcaaagcccagacctggacagcgtctttcttggcaacctgcacgatcgcggcatctcgttcaccaaccccgatgccgccgtctacaacggcaagatggtctgcaccaatctcggcggcggcatgaccgtgcagcaggtggtcgaggcattgcagagtagcagccctgcacttggcgaccggacaaccgcttacgtggccgtctcgattcgcacgtattgtccgaagtacgacgctgtgctgccaccgggatcctga

SEQ ID NO: 926 - DNA, 438 bp, Tuberculosis
gtgaagctcagcaaccagaaacggcactggccgggctatctgttcggccggatccgcacgtcgaccctggtgttgatcgccgcgttcctggcggtgtggtggatttacgagacctataggccacaggcaccaggtcctggtgactctccgccgacccaggtggtgccgccgggcttcgtgcccgatcctgactacacctgggtgccgcgaaccagagtgcaaccacccaccgtcaaggcgacgccgaccaccacgtcgagcacaccgccggtcagcccgcccgaaaccacgaccgattcggctgtcccgccgccgtttgagttgccgccgccgttcggcccgggcaccacgaccccaacaccaccggcaccgctaccgcagcccgggccgggtccgacggccggcacctaccccaaatccgagccaccgacccgttga

SEQ ID NO: 927 - DNA, 513 bp, Tuberculosis
atgatcgaccatgcactcgcgctgacacatatcgatgagcgtggtgcggcacgaatggtcgatgtgtccgagaaacccgtgactttgagggttgccaaagcgtcagggctcgtgatcatgaagccgtctaccttgaggatgatttccgacggtgccgctgctaagggtgacgtcatggcggcggcccggatagctggcatcgcggcggcgaaacgtacgggtgatcttattccgctatgccacccgttagggctcgacgctgtcagcgtcactatcacgccgtgcgagcctgaccgggtgaagattctggcgacaaccaccacgctggggcgtaccggcgtggaaatggaagcgttgaccgcagtttcagtcgccgccttgactatctacgacatgtgcaaagccgtcgatcgagccatggagatttctcagatcgtgctccaagagaaaagcggcggccggtccggagtttatcgccgaagtgcttctgatttggcctgtcagtcccgataa

SEQ ID NO: 928 - DNA, 834 bp, Tuberculosis; identical to SEQ ID NO: 794

SEQ ID NO: 929 - DNA, 1230 bp, Tuberculosis
gtgagtttcgtcgtgctgccgccggagatcaattccttgcgaatgttcatcggtgcaggcactgcgccgatgctggcggcggcggcagcctgggacgggcttgccgaagagttggggaccgcggcgcaatcatttgcgtcggtcacggccgggctggcgggtcaggcgtggcagggtccggcagccttggcgatggcggcagcggcggctccctacgcggggtggttgaccgcggcagcggctcagtcggccggggcggcgggacaggcgcgcgcagtggccagcatcttcgaggcggcgcaggcggcgacggtgcttccggcggcggtggccgccaaccgcgacgcattcgtgcagctggtgatgacgaatttgttcgggcagaacgcgccgttgattgctgccgccgagggtgtgtacgaggagatgtgggccgcggatgtggccgccatgtcggggtactactccggggcatcggcgattgccgcgcaagtggtgccgtgggcgagtttgctgcagcgatttccgggtttgggtgccggcgccaccggcgctactggcggtgagagcgtcggcaccggcgctactggcggcgagagcgtcggcaccggcggcggtgagagcgtcggcaccggaggtgcaaccgctagcggcgggggcgtcggctacgtcggaagcggcgtggctagcgccgggttagcggccggtgatccggcccatggcagtgtaggccaagggaatttcggcggtggcgatgttggcgccggagacgtcgtcgcgtcgagcgctaccagtgcccatgccggcgttgtgagccccggcttcatcggtgccccgctcgcgctcgccgctctgggtcagatggcacgtggcggcactaactctgccccgggaactgccaccgagtcagctcgagcgccagagccggcggcttccgcgccaccggaagccgttgtggaagttccagaacttgaagttccagcaatgggggtgctgccaactgtggatccgaaagttgcggccaaggccgctccgctgtcgacaacgcgggtaggccaatccgcgggttctggaattccggaatcgacactacgcaccgcgcaaggtcagcaggcttcagagacttcagcggcggaggagacagcgccgtcgttgcggccggaagcggcagcgggccaattacgacctcgggtaagaaaggacccgaagattcaaatgcggggcggctga

SEQ ID NO: 930 - DNA, 957 bp, Tuberculosis
atgacgcaccgggcgagcgcgctcatcagcgcacaggagtggttctccgctggggagagggtgggctacgacgctgagcggccgggcatcaacccacgttcgccgctgcgcgcgttcatacggcgcgctgctgggacgggggtcacgcgaacgttcctgcctggctggccggatggttcctacggttgggcgaaggtggaagctttcttgagctcgcgattccacttcccccgcatctacctggactacatcggccacggcgactccgacaaaccccgggattacccgtactcgaccttcgagcgcgcggatctcgtcgaagccctctggcacgccgaggggatagcgcagaccgtcgtcgttgccttcgactactcctgcatcgtcagccttgagctgctggcgcggcggatcgatcgcgagcgggcgggaaacgatcagcggacccgaatcacggcttgcctgctcgccaacggcggcatctttgccgacggccacacccacgcctggtatacgacgccgctgctcacatcgccgctcggcgcggcgatcacgccgatcggccagcgctcatggcgcatgttcgccccattcttgcgccccgtcttctcgcgcggatacccattaagcgcagcggagatgaaggagctccacgacgcgatcagccggcgcgacggcgtgcgcgtgctgcccgccacggcgggcttcgtggacgagcatcgcgagcacgcagcgcgctgggacctggcgcggatcatttcggcgctgggcgatgaggtcgcctttggtgtggtgggcagcgccgaggatccattcgagggagagcaactgcggctcgcccgagagcggcttgcggattcggtggaaatcaccgagcttgcgggcggccacctgacgacagcggagcagcccgatcggctcgccgaggttattgcggccctgcccgagcgttcctaa

SEQ ID NO: 931 - DNA, 360 bp, Tuberculosis
ttgcgactcggcgccggattccgcaaaccggtgccgacactgctactcgaacaccggagccgcaagtccggcaagaacttcgtcgcaccactgctttacatcaccgaccgtaacaatgtcatcgtcgttgcctctgcccttgggcaggcagaaaacccgcagtggtatcgcaacctgccgcccaatcccgacacccacattcagatcggatccgatcgccgcccggtgagagccgtcgtggccagctcggacgagcgggcgcgcctatggccgcgcccagtagacgcctacgccgacttcgattcttgccaaagctggaccgagcgtgggattccggtgatcatcttgcggccacgctaa

SEQ ID NO: 932 - DNA, 306 bp, Tuberculosis
atggcgccggtgaccgacgaacaggtggagctggtgcgctcactggtcgcggccatcccactcggccgggtgtccacctacggcgacatcgcagctctcacagggctttccagtccgcgtattgtcggctggattatgcggaccgattcctcggatctgccctggcaccgggtgatcagagcctccgggcgcccagcacagcacctggccacccggcagttggagttgttgcgcgcagagggcgttctcagtgttgacggccgggtggcgctgagcgagatccgctatgagtttccgccgggctga

SEQ ID NO: 933 - DNA, 333 bp, Tuberculosis
atgcgaggccacgtcgctgaggttaatggcggagttgccgcgatggcgctgtggtttctgaacttttccacctgggacggcgtcgcgggcatctatgtggaggacttgttcgtctggccgaggtttcgccgccgcggcttggcccgtggcctgctgtcgacgctggccagagaatgcgtcgacaaccgctacacgcggttggcctggtcggtgctgaactggaattccgatgcaatcgcactgtatgaccgcatcggcgggcaaccgcagcacgagtggactatctatcgactgtcaggaccgcggttggctgcgctggccgcaccacgctga

SEQ ID NO: 934 - DNA, 552 bp, Tuberculosis
atgagcagcccggtgtcaagccgccgtttggcgaacttggtcaaggagagcctgcagggctcggtgttgggtggggtcgtaagcgatgccgtcttgccagcggtgtcagatgacgtaaagccaggcgcgggcgaggatgcgtaccgcgtgccggtggtcgtggccgcgggctcgggtgcggttgtgcaggtcggcggcctagaggttggctcggcggctgtcgccggcgaagtcgcagacaccgttgcggagttgtttgtctgccgcccaaccgaacccgacgtgggtgactttgtcggactagccggtggagcgggcgacgccggccaagcaggccagcaattcgggctgggcgtcggcgtgcggggcgagtcgttcggcgctcgtcggcgcttggccctgtcgacggtcggcgcgtccggggcaaccgccggactccgcaaaactcatgatggacatcacggctgtcaagcgcgcggggcgctaacccagcggcgcctctacatcggcaatccatccgagatcaccgacacaaggatggtgcaccagtga

SEQ ID NO: 935 - DNA, 645 bp, Tuberculosis
gtggattcaggtcaggttctggccgaaccgaaatcaaacgctgagatcgtgttcaagggccgtaatgtcgagatccccgaccacttccgcatctacgtttcgcagaaactcgcccgcttggagcggttcgaccggaccatctacctgttcgacgtcgaactcgaccacgaacgtaatcgccgccagcgcaagtcctgtcagcgcgtggagatcaccgcgcgtgggcgagggccggtggtgcgaggtgaggcctgcgccgacagcttctatgccgcgcttgaatcagcggtcgtcaaactggagagccggctgcgccgcggtaaggatcgccgcaaggtgcactacggcgacaaaaccccggtttcgctggccgaggcgaccgcggtggtgccagcgccggagaacggcttcaacaccagaccagccgaggcacacgatcacgacggtgccgtcgtcgagcgggagcctgggcggatcgttcgcaccaaagaacacccggccaagccgatgtcggtcgatgacgcgctctaccagatggagctggttggacacgacttcttcttgttctacgacaaggacaccgaacggccgtcggtggtctaccgccggcacgcctacgactacggcttgatccgtctggcgtga

SEQ ID NO: 936 - DNA, 645 bp, Tuberculosis
gtgctaatcgcgattgagggcgttgacggcgctggcaagcggacgttggtggaaaagctgtccggggcctttcgagcagccgggagatcggtggccacactggcgttcccgcgctacggacagtcggtggccgccgacatcgcagcggaggcgctgcacggcgagcacggtgacctcgcatcgtcggtgtatgcgatggcgacgctgttcgcgctcgaccgcgctggcgcggtccacacgatccaggggctgtgtcgcggctacgacgtggtgatcctggatcgctacgtcgcctccaacgcggcctacagcgcggcgcgcctacatgaaaacgcggccgggaaggcagcggcctgggttcagcggatcgaatttgcaagactcgggttgcccaagcccgactggcaggtgctccttgcggtctctgccgagctcgccggggaacgatcccgcggccgtgcccagcgtgaccccggtcgggcgcgcgacaattacgaacgcgacgctgaacttcagcagcgcaccggtgcggtctacgccgagttggcggcccaagggtggggcggccggtggctggttgtcggcgccgatgttgatccgggccgactagcggcgactttggcgcctccagacgtgccaagttga

SEQ ID NO: 937 - DNA, 624 bp, Tuberculosis
gtgcaggtccatgtcgttgaccacccactggccgcggcccgactgaccacgctgcgtgacgaacgcaccgacaacgccggcttccgggcagcgctgcgcgagctcacgctgctgttgatctatgaggccacccgcgatgcgccctgcgagccagtcccgatccgtacgccgctggccgagacggtcgggtcgcggctaaccaagccacccctgctggttcctgtgttgcgggcggggttggggatggtcgacgaggcgcatgccgccttgccggaggcgcacgttggctttgtcggtgtcgcccgcgacgagcaaacccaccagccggtgccgtatctggactcgctgcccgacgacctgacggatgtaccggtcatggtgcttgacccgatggtggccaccggcgggtcgatgacgcacaccctcggtctgctgatctcgcgcggtgcagcggatatcacggtgctgtgtgtggttgcggcgccagaaggaatcgcggcgctgcagaaggctgcgccaaacgtgcggttgttcactgcggccatcgacgaagggcttaacgaggtcgcctacattgtgcccggtctcggcgatgccggcgatcgccagttcggcccgcgctga

SEQ ID NO: 938 - DNA, 846 bp, Tuberculosis
atgttcaccggcatcgctagccatgccggcgccctgggtgccgccttagtggtgctgatcggcgccgcaattctgcacgacggcccagcagcggccgacccaaaccaagacgatcggtttctggcgctgctcgagaaaaaggaaatccccgccgtcgcgaatgtgcctcgcgtcatcgacgcggcccacaaagtgtgtcgcaaactcgatggcggcatgccggtgaacgacattgtggacgggttacgcaacgatgcctacaacatagacccggtcatgcgcctctaccctgtccgcctcacgacgaccatgacccgatttatcagtgcggcagtggagatctactgcccgaaccatcacagcaagatggcgttcgccatggccaatttcgagccgggatcgaatgaaccgacgcatcgcgttgcggcgtccacgcgcagcgcggtcaactcgggaagcgacctgcgggcgtcggtgtcggacatgaccatcatgtcgccgggatggcgggaaccgacgggtgcgatgcttgcctcggtgctcggagcggttcgcgcgggggatcccctgataccgaatccgccgccgattccggtaccgccgccggcggcgcagaccctgattccacccccgccgatcgtggcaccgccgccaccgcgaccagcgccgccgcaacagccgccgcccccgccgccagaggttgagccgcctgctggtgttccgcagtccgggggcgctgccggcagtggcggcgccggcagcggtggtggcggcggtggtgacggaccggtagagccgtcgcctgcacgacccatgccgccgggctttatcaggctcgcgccgtga

SEQ ID NO: 939 - DNA, 1455 bp, Tuberculosis
gcacaggccagtccggcggcccacggcggcagcggtggtgccggtggcaacggcggcgctggctcggccggcaacggcggcgccggtggtgccggtggcaacggcggtgccggcggcaacggtggcggtggcgatgccggcaacgccggctcaggcggcaatggcggcaagggcggcgacggtgtcggccctggctccaccggcggcgcgggcggcaagggcggcgctggcgccaacggcggttccagcaacggcaacgctcgcggtggcaacgccggtaacggcggccacggcggcgccggcggcagcggcgacacgggcggcgccggcggcgcaggtggccagggtgggttcggtggcaccgggggcagcggcagcggcattggcggcggcgccggcggcaacggcggcaacggcggcgccggcggcaccggcgtcgtgcttggcggcaagggcggcgacgggggcaacggtgaccacggtgggcctgccaccaacccgggcagcggcagccgcggcggcgccggcggctccggcggcaacggtggcgccgggggtaacgccaccggctcaggcggcaagggcggcgccggtggcaatggcggtgatgggagcttcggcgctaccagcggccccgcctccatcggggtcacgggcgcccccggcggcaacggcggcaagggcggcgccggtggcagcaaccccaacggctcaggtggcgacggcggcaagggcggcaacggcggtgccggcggcaacgggggctcgatcggcgccaacagcggcatcgtcggcggttccggtggggccggtggcgctggcggcgccggcggaaacggcagccttagctccggcgagggcggcaagggcggcgacggtggccacggcggtgacggcgtcggcggcaacagctccgtcacccaaggcggcagcggcggtggcggcggcgccggcggcgccggcggcagcggctttttcggcggcaagggcggcttcggcggcgacggcggtcagggcggccccaacggcggcggtaccgtcggcaccgtggccggtggcggcggcaacggcggtgtcggcggccggggcggcgacggcgtctttgccggtgccggcggccagggcggcctcggtgggcagggcggcaatggcggcggctccaccggcggcaacggcggccttggcggcgcgggcggtggcggaggcaacgccccggacggcggcttcggtggcaacggcggtaagggtggccagggcggcattggcggcggcactcagagcgcgaccggcctcggcggtgacggcggtgacggcggtgacggcggcaacggcggcaacagcggcgccaaggccggcggcgccggcggcaaagggcaggccggccagcccaactcaggcacggagccagggttcggcggcgacggcggcctcggcggcgccggcgcaacaccctga

SEQ ID NO: 940 - DNA, 492 bp, Tuberculosis
gtgactgccgagaatccaggacggagcaggcggacgctggtcggaatcgacgcggcgatcacggcctgtcaccacatcgcgatccgcgatgatgtcggtgcgaggtcgattcgattcagtgtcgaacccacgctggccggactgcgcaccctcaccgacaagctcagcggttacgacgatatcgacgccaccgtggaaccgacctcgatgacgtggctgccgctcacgatcgctgtcgagaatgccggtgacaccatgcacatggccggcgcgcggcattgcgcccggctgcggggtgcgatcgtgggcaagagcaagtccgacgtcatcgacgccgaggttctcacccgcgccagcgaggtgttcgacctgacgccgctgacactgccgacgcccgcgcagttggcgttacgtcgatcggtgatccgacgtgccggcgcagtgattgacgcgaaccggtcctggcgtcggttgatgtcgttggcgcggtag

SEQ ID NO: 941 - DNA, 372 bp, Tuberculosis
gtgtcggccgcgaccgatctctatgcggtccatcaagcgttggccggtgagagccgggcgattccgaccggcagctgcccgaccgtgggtgtggcgggtttgaccctgggcggcgggttaggcgccgattctcgccatgcggggttgacctgcgatgcgctcaagtcggcgacggtggtgttgcccggcggtgatgcggtgagcgcgtctgccgacgaccacgcggagctgttctgggcgcttcgtggcggcgggggcggcaacttcggggtgacgacatcgatgacgttcgcgaggttccccaccgcggactgcgatgtcgtccgtgtcgatttcgcgccgtctgcggccgcgcaggtgctggtcggctga

SEQ ID NO: 942 - DNA, 552 bp, Tuberculosis
ttgcagcagtgggttgattgcgaattcaccggtcgagacttccgcgacgaggaccttagccgcctgcacaccgaacgggcgatgttcagcgaatgcgatttcagcggcgtgaatctggccgagtcacaacaccgagggtcggcgtttcgtaattgcaccttcgaacggacgacactgtggcacagcacatttgcccagtgcagcatgttgggctcggtcttcgtggcttgccggctgcggccgctgacgttggacgacgtggatttcacgctcgccgtgctcggcggaaatgatctgcgtggtctcaacttgaccggctgccggttgcgagagaccagcctggtggataccgacttgcgcaagtgcgtgctgcgcggcgccgacctcagtggtgcccgtaccacgggcgcccggctggatgacgccgacttgcggggcgcgaccgtggacccggtattgtggcggaccgcgtcgttggtgggtgcgcgtgtcgacgtcgaccaagccgtggcctttgcggcggcgcacgggctgtgcttggcagggggctag

SEQ ID NO: 943 - DNA, 309 bp, Tuberculosis
atgacgccgaccgcttgtgctacagttagcacaatgacctcggtgggggtgcgtgcgctgcggcagcgggccagcgagctgctgcgccgagtcgaggccggcgagacgatcgagatcaccgaccgcggccggcccgtcgccctgctctcgccgctgccgcagggcggtccatacgagcagctgctggcaagcggcgagatcgagcgtgccacgctcgacgtcgttgatctgcccgaaccgctcgacctcgacgcgggcgtcgagctgccgtcggtgacgcttgcgcgcctgcgtgagcacgagcgttga

SEQ ID NO: 944 - DNA, 864 bp, Tuberculosis
atgcccgacgagctgaagccgcacttcgccaacgtgcaggcgcactacgacctgtccgacgacttcttccggctgttcctcgatcccactcagacctacagctgcgcctacttcgagcgcgacgacatgacgctgcaagaggcgcagatcgccaagatcgatctcgcgctgggcaaactcggattgcagccgggcatgacactgttggacgtcggctgcggctggggcgccaccatgatgcgcgcggtggaaaaatacgacgtcaacgtcgtcggtctgaccctgagcaaaaaccaggccaaccacgttcagcagctggtcgccaactccgaaaatctacgctccaaacgcgttctgctggccggctgggaacagtttgacgagcccgtcgaccgcatcgtcagcatcggtgctttcgaacatttcggtcacgagcgctacgacgcgttcttcagcctggcgcatcgcctgctgcccgctgacggggtcatgctgctgcacaccatcaccgggttgcatccgaaagagatccacgaacgcggcctgcccatgtcgttcaccttcgctcgtttcctgaaattcattgtgaccgagatctttccgggtgggcggctgccctcgataccgatggtgcaggagtgtgccagcgcaaacggcttcaccgtcaccagagttcaatcgttgcagccgcactatgcgaaaaccctcgacctctggtccgcggcgttgcaggccaacaagggccaggccatcgcgctgcaatccgaggaagtctacgagcggtatatgaagtacctcaccggctgcgccgagatgtttcgcatcggatacatcgacgtcaaccagttcacctgccagaagtga

SEQ ID NO: 945 - DNA, 627 bp, Tuberculosis
gtgcaatcgcgtaaaaccacctcggtactggcggctgccctgctgttttgcggcctgttaggcccagggacggccccaccggccaccggtggcgggcctgcctgccggccggcagagctcttcgccaccgacaacaccaccgatgggttcgagctaccggccgttgcgactatcgcactaaccggcacggtggtgaccggatcgaccctggtcgacggcgtgttctggtcgaatgagcgccagcagatcggctacgagcgctcccgtgaatttcatctgtgcgttgtcgacgcgcccacattgcacaacgccgccgaggcactgcaccgccagttcaaccaagaagcggtgctgaccttcgactacttgccgcagaatgcacccgaggcggacgcgatcctcatcaccgtgcccgacatcggcatcgcccgcttccgcgatgccttcgcatctgatttggctgcacaccaccgattacggggcggatctgtcaccacagccgaccacaccttaatcctggtcgccggcaacggcgatctcgatgtcgcccgccgactcgtcgaggaggccggcggggactggaacgcaaccaccattgcccatggcaggcgtgaattcgtgaactag

SEQ ID NO: 946 - DNA, 411 bp, Tuberculosis
gtgatctatatggacacctcggccctgactaagctgctcatctccgagcccgagacgaccgaactgcggacatggctgaccgcgcaaagcggccagggcgaggacgcggcgacaagcacccttggccgggtcgagtcgatgagagtcgttgcccgatacggacaaccaggccaaactgagcgtgcgcgttacctactcgacgggctcgacatcctcccgctcaccgaaccggtgatcggtctagctgaaacgatcggaccggccaccctacgttctctcgacgcgattcacctcgcggccgcagcccagatcaagcgggaactgacagccttcgtcacctacgaccaccgattgttgagcggatgccgtgaggtcggcttcgtcaccgcctcacccggcgcagtccggtga

SEQ ID NO: 947 - DNA, 420 bp, Tuberculosis
atgccaccagcaaaaaaagggccggcaacgtcggctaggaagggccagaagacccgccggcgggagaagaagaacgtcccgcacggcgccgcccacatcaagagcacgttcaacaacacgatcgtgaccatcaccgacccgcaaggcaacgtcattgcctgggcatcgtcggggcacgtcggcttcaagggttcccggaaatcgaccccgtttgcggcccagctggccgcggagaacgccgctcgcaaggcccaagaccacggggtgcgcaaggtcgacgtgttcgtcaagggcccgggctcgggccgcgagaccgcgatccggtcgctgcaggccgccggcctggaggtgggcgcgatctcggatgtcaccccccagccgcataacggtgtccggccccccaagcgccggcgcgtctag

SEQ ID NO: 948 - DNA, 858 bp, Tuberculosis
atgaccaattgtgccgccggcaaacccagctcaggccctaacctcggccgattcggatcgttcggacgcggcgtcaccccccagcaggccacagaaatcgaggcgctgggctacggggcggtctgggtgggaggctcaccacccgccgcactgtcctgggtggaaccgattctgcaagcgaccaccacattgtgtgtggccaccggcattgtcaatatctggtcggcaccggcccagcgagtcgccgaatcgttccaccgcatcgaggcggcctacccgggccgctttctgctgggtatcggagtcgggcatgccgagatgatcagtgagtaccgcaagccctacaacgcgctggtggaatacctagaccggctcgacgactatggggtgcccgccaaccgccgggtggtggccgcactgggcccccgggtcctgggcctgtccgcacgccgcagcgccggggcgcacccgtacctgaccacacccgaacacacggcacgggcccgtgagctgattggtccgtcggcgttcctggcgcccgaacacaaggtggtgctgaccaccgactcggcaagggcccgtacggtgggacgccaggcgctcgatatgtacttcaacctggctaactaccgcaacaactggaaacggctgggcttcaccgacgacgaagtctcccggccgggcagcgaccgcctggttgacgccgtggtcgcctacggcactccagacgcgatcgcggcacggctgaacgaacacctgcttgcaggcgccgaccatgtccctattcaggtcctcaccgaagatgacaacctggtgtcggcgctgaccgaactcgcgaagccgctccgactgacttga

SEQ ID NO: 949 - DNA, 507 bp, Tuberculosis
atgcgcccggtggatgagcagtggatcgagatactcaggatccaggcactgtgtgctcggtactgtttgacgatcgacacccaggatggcgaaggctgggcgggatgctttaccgaggacggtgccttcgagttcgacggctgggtgatccgggggcggcccgcattacgcgaatacgcagatgcgcatgcccgcgtcgtgcggggccgccacttgaccacggatcttctctacgaggtcgacggggacgtcgccaccgggcgcagcgccagcgtggtcactctggccactgccgccggctacaagatcctcggctcgggcgagtaccaggatcgcctcatcaagcaggacggccagtggcgtatcgcgtaccggcgattgcgcaacgatcggctggtgtcggatcccagcgtggcggtaaacgtcgccgatgccgacgtcgccgcggtcgtcggtcaccttctcgcggccgcgcgccggctcggaacccagatgagcgacacgtag

SEQ ID NO: 950 - DNA, 4146 bp, Tuberculosis
atgtcgtttgtgttggtttcgccggagaccgtggcggcggtggccacggatctcaagcgcatcggcgcctcgctggcccacgaaaacgcgtcggcggccgcttcgacgacggcggtggtctccgcggccgccgacgaggtatcgacggcggtcgccgctctgttctcccaacacgcccagggctaccaagcggcggccgctcaggtagcagcgtttcatagccggtttgtgcaagccctgacggccggtgccggggcgtacgcatttgccgaggcggccaacgcgtcgccgctacagtcagccatgggtgcggtaagcgcgtctgcgcagacgctgttgtcgcgcccgttgatcggcaatggcgccaatgcgacgacgccgggcggtaacggcggcgacggcggatggctattcggcagcggcggcaacggcgcgcccggcgcggcgggccagtccggcggtaacggcgggtcagccggactgtggggtaacggcggcgcgggtggcgccggcggcagcggcggcgccgccggcggcaacggcggtaacggcgggtggctgttcggcgccggcggcaccggcggtatcggcggcaccggtgctcccggcgccatgggcggcaccggcggcaacggcggcaacggcgcgctgctgatcggcggcggcggcctcggcggcgccggcggcatgggtggcaccggcggcggcaccggcggcaccggcggcaacggcggcaacggcgcgctgctgatcggcgctggtggtgtcggaggtgctggcgggatcggtggccagggtaccggcgccggcggtgccgccggcgccggcggcaccgggggcaacggcggcgccggggggttgttcatgaacggcggcgacggcggcgccggcggtcaaggcggcgacggtgcggccggcgacgcggctgccagcgccggcggcaccggcggcaaaggcggccaaggcggcgacggcggcaccggaggggccggcggcgcaggcccagtgctgttcggccacggcggcgccggcggcatgggcggccaaggcggcaccggtggaatgggcggcgccggcggagacggcaccaccgtcatcgcggccggtaccgggggggagggcggcaccggcggcgcggccggcgccggcggagccgcaggcgctcgcggggctctcaccagcggcggcctagccggcggcgtcggggccggcggcaccggcggcaccggcggtaccggcggcaacggcgctgacgccgctgctgtggtgggcttcggcgcgaacggcgaccctggcttcgctggcggcaaaggcggtaacggcggaataggtggggccgcggtgacaggcggggtcgccggcgacggcggcaccggcggcaaaggtggcaccggcggtgccggcggcgccggcaacgacgccggcagcaccggcaatcccggcggtaagggcggcgacggcgggatcggcggtgccggcggggccggcggcgcggccggcaccggcaacggcggccatgccggcaacacaggtgacggcggcgacggcgggaccggcggtaacggcggcaacggcaccggaggcgtgaacggcgccgacaacaccctcaaccccgacacccccggcggcgccggggagcccggcggggccggcggggccggcggggccggcggggccgccggcggcccgggcggtaccggcggtaccggcggtaacggcggcaacggcggcaacggcggcaacggcggcaacggcggcaacggcggcaacggcggcaatgccggcaacaacagcaccaatgccccagtcggtggcgaaggcggcgccggcggcgacggcggcgccggcggcgcaggcggggccgccaacggcggcaccgcgggcagccagggcactgggggcgtcggcggcgacggcggcgcgggcggcaacggcggcggcggcaaggctggcaccggcaacagcggcaactttggggtggacggcgaagccggcttcagcggcggcgccggtggcaacggcggcgtaggcggggccgccggcgccaatggcggaaccggcggcagcggtggtaatggcggtgacggcggtgcgggaggcattggcggggccggcggcaacggcataccgggcactggcacagagcctgccgggggcaccggcgccaaaggtggagacggcggcgacggtggcgccggcggcgcaggcggcaatgccggcggggccggcggccagggcggcaatgccggccagggtggcgccggcggtgcgggcggcaacgccgtgattcccggcgacggcgtcgggaaggcgccgcacggcgacgcgggcggcagcggcggagacggcggcaaaggcggccagggcggtagtggcggcaccggcggatccggtgccccgatcggtggcggcgccggaggcaccggagggtccggcggacacgccggcaagggtggcgccggcggcatcggcgcacagggcaccaccatcaccgtgcccgggaacggcggcaacgccggcgacggcggcaacggcggcaacgccggcgccggtggaaacggcggctccggcgacttcggtggcaataccaccagcggcgcctccggcagcggcggcaacggcggcaacgccggcaccgcgggtagcggcggtgcgggcggaaccggcggcaccggccttagcggcggcaacggtggcaacggcggcaacggcggcaacggcggtgacggcggtaacggcgcccacggcaccgtcggcgcccagttcgtcccggccaccagcttgcccacacccaacggcggggccggtggcaacggtggcaccggaagcaacggcggcgcgcccggccccgccggggcgcccggccccactaccggcggtaacgctggcagccagggcatcggcggcgacgggggcaacggcggcgacggcggtaaaggcggtgacggcgccgacgctgtcaacgtcgtattcatgccgactgagccacaggccgcgaccggcactgccggcagcgccggtgaccccaccggcggtaacggagggcccggcactcccggcagccccatggttgccccgcccccgccaacgccaatcactcaagtccaacagggcggtgacggtggcgccgggggcaccggatccaccaacgccaacgacggcacagccaccggcggaaagggcggagaaggcggagtcggcagcattctcggcgggcccggcggcaacggcggaactggcggcaacgcctcggcaaccggcaccaacggggtggccaacgccgggaatggcggcaagggtggcgacggcggccagtttggggccggcggcaacggtggtgccggcggcagcgtaaccgacggatccgccggcagcaccgcaggcaacggcggcaacggcggcaacgcaaccaacggcaccatcgcaggccaacccgccggcggcaacggctcggccggcgggaaaggcggcgacggcggcaacatcgccgccggtgccaccggcaccgccggcaacggcgggaacggcggcaacggcaacgacggcgccgtcaacgccggcaccggcggctccggcgggaacggcggtaacgccggtggcggcggcgccaatggcggcgacggcggcgccggcggcgccggcggggccggcgggcgtggcggcaagggcatcgacggcgggttcggcggtgacggcggcaacggcggcagcaacaacggcaccggcgccggtggcaacggcggcaacggcggcaccggcggggtcggctcggttggcgcggctggtggcgatggcggcaacggcggcaccggcggcttcgccggtttcggcggcaccgcaggcaatggcggttccggcggcacgggcggggccggcggcgacggcggcaccggcggggacggcggcaacggcgttatcgccggcggcggggggaccggcggcaacggcggcgccagcggggccggcggcgccggcggcacgggcgggttcgccggcaacggcaatgccggcggcaatggcggcaccggcggcgcgagcgaggacggcgacaacggcaacgctggcagcggcgccaccggcggtaccggcggcaacggcggcaccggcggcgacggcggcgctgccgggctgggcggcgtcgcgtga

SEQ ID NO: 951 - DNA, 861 bp, Tuberculosis
atgcccatcgacttggacgtcgcgctgggtgcacagctaccgcccgtcgaattctcttggaccagtaccgatgtgcagctctaccagctgggactgggcgccggctctgatccgatgaacccccgtgagctgagttatctggcggacgatacaccgcaggtgttgccgacgttcggcaacgtcgcggccaccttccacctcaccacaccaccgaccgtccagtttccgggcatcgatatcgagctcagcaaggtgctgcacgccagcgagcgagtcgaggttcccgccccgctgccgccgtcgggttcggccagggcggtcacccggttcaccgacatctgggacaagggcaaagccgcggtaatctgcagcgaaacgacggcgaccacaccggacggcttgctgctgtggacgcagaagcggtcgatctatgcccgtggcgaaggcggattcggcggcaagcgcgggccgtcgggatcagatgtcgcgccggagcgggcgcccgatctgcaggtcgcgatgccgattctgccgcagcaagcgctgctctaccggctctgcggcgaccgcaacccgctgcactcggatcccgaattcgccgctgccgcaggctttccccggcctattctgcatggcctgtgcacctatgggatgacctgcaaggcgatcgtcgatgcattgctggactccgatgcgacggccgtggccggctacggcgcacgctttgctggcgtggcgtacccgggcgagacgctcacggtcaacgtgtggaaggacggccgccgcctggtggccagtgtcgtcgcacccactcgtgacaacgctgtggtgctcagcggagtggagctggtgccggcatag

SEQ ID NO: 952 - DNA, 870 bp, Tuberculosis
atggacgaacttccatggcccgtcctgggctcggaagtgttggccgcaaaggccattccggagcgggccatgagacagctctacgagccagtctacccgggcgtctacgccccggccggtgtggagctgacggcgcgccagcgcgcccacgcggcgtggctgtggtcgcggcgccgcgccgtcgtggccggcaattcggcggcggcgctgcttggcgcgaagtgggtaaacccagcgcttgacgcagagttagtgcacgccaatcgaaagcctccgccgcgcatcgtcgtgcacacggatcgattggcgccgcacgagacggttgcggttgacggtgtcgcggtaaccaccccggcgcgcaccgccttcgatatcgggcggcgcacaccctcgcggctgcaggccgttcaacggctggacgcgttggcgaattcgaccgatgtcaaggtcgccgacgtgcaggccgtcattgccgaacataccggtgcgcgcggcctggtccgcctccgtgcggtgctgccgctgatcgacgggggtgcggaatccccacaggagacgtggacccgattggtgttgatcgatgccggtctgccgaagccgcaaacacagatcagagtgtttgacgactacggggacttcgtcgcccgcatcgacctgggctacgagcaattgcgagtcggtgtcgagtatgacgggccacagcattggacagacccggcgcagcgggctcgggacatcgagcggtccaccgcgttgctggatctgggctggacgatcatcagggtcaccagtgagctgctctggtaccgccggggcacgttcgttggccgcgtcgatgccgcgatgcgggcggcgggatggcgcccatga

SEQ ID NO: 953 - DNA, 564 bp, Tuberculosis
atgtcggctcagatcgatccacgcacgttccgctccgtgctcggtcagttctgtacggggatcactgtcatcaccactgtgcacgacgacgtgcccgtcgggtttgcgtgccagtcgttcgcggcgctgtcgttggaaccgccgttggtgctgttctgccccactaaggtgtcgcggtcctggcaggccatcgaggccagcggccggttctgcgtcaacgtactgaccgaaaagcagaaagacgtctcggcgcgattcggctcgaaggagccggacaagttcgccggtatcgattggcgcccttcggaactaggctcaccgatcatcgagggatcgctggcctacattgactgcacggtggcgtcggtgcacgacggcggcgatcacttcgtggtgttcggtgccgtcgagtcactgtcagaggtcccggcggtcaagccgcggccgctgctgttctatcgcggcgactacaccggcatcgagccggaaaagaccacgccggcgcactggcgcgacgacctggaggctttcctcatcaccaccacccaggacacctggctctag

SEQ ID NO: 954 - DNA, 1755 bp, Tuberculosis
atgtcgtttgtgatcgtggcgccggaagcgctgatgtcggtggcttcagaggtggccggtatcggttcggcgctcaatgccgccaacgccgccgcggccgccccgaccacgggtgtgctagcggccgccgcggacgaggtgtcggcggcgatggcggcgctgttcggcgcgcacgcccaggagtaccagaggctcagcgcccaggcggcggggtttcatgcccagttcgtgcaggcgttaaacgcgggagtgaactcctatgccagcgccgaggccgccaacgcgtcgccgctgcaagccgtggagcagcaggtgctcggcttgatcaacgggcccgcgcagacgctactggggcgcccgttgatcggcaacggtgccgacggggcgccgggaaccgggcagccgggcgggcccggcgggctgctgtggggtaatggcggcaacggcgggtcgggtgtggccggtgtgggcgggcccggtggtagcggcggcgccgccgggctgttcgggcacggcggcaatggcggggccggcgggagcaacgccgccggcgccggcggtgtgggcggagccggtggggcgggctggctggtcggcaacggcggtgccggcgggttcggcggggtgggaacgaccgtcagtggcaacggaggagccggcggcgccgccggcgcgttcggcaatggcggtgtgggcggggcgggcggggccgcggtcatcggcgggttgcccggcaatgggggtgccggcggcaacgcggggctgatcggcgccggcggcgacggcggcgtcggcggggtgggtgcccccggaaccaacgggatgaacccgccgccgaaccagaccagccaggcggcaaacggaagccccggcgccaacaacggcgccggtagcggtggcgcagggctgcccggcaacccgggtgccgtaccagggcgggctggcggcgctggcggtttaggcggcagcggcagcgatacgagtgaaggccctgtgacggggggcaacggaggcaatggcggcgacggcggtcccggcgcgcccggcggcaacggcgcacccggcggcatcggtgtcaataccggtactggctgggcctacgggggaaacgggggcaatggcggtgacggtggcgccggcgcccggggcggcgacgggggcaacgggggcaacggcctagcgctaaacggtggcaacgggatcggcggcaacggtggcgccgggggccggggcggcaccggggctgcgggcggcaatggtggcattggcggcggcgccaccggcacgctgaccttttttggtagcggaggcgacggcggccccggcggggctggcgccaacaccgccggcaccgggggtgtcggcggtgtcgggggtgcgggcggtcagggcgggctgctgttcggcgacggcggtaacgggggcgccggcggtgccggcggcatcggcggcacgggtgcctcgggcggcgccggaggcaagggcggctctggcctggtcggcggtgacggcggcaacggtggtgccggcggcgccggcggcaacggcggcaagggcggtgccggaggtgccggcggaggtgccggaatgttcagccagccaggtgtccacggtgcgggcggtaccgggggccagggaggtgccggcggcgctggcggcgcgggtggcgccgcgggagctgggacagtcgtcgcgggcaaccccggtgatcccggcggtttcggcgccgccggtgcggacggcctacccggctaa

SEQ ID NO: 955 - DNA, 651 bp, Tuberculosis
ttgacgcccgcgttggtcgttggtcccgcggcgtggcacgctgtgcacgtgacccagagctcctcggcgatcacccccgggcagacggcggagctttatccgggggacatcaagtcggtgctgctcacggccgagcagattcaggcccgcatcgccgagctcggcgagcagatcggcaacgactaccgcgagctgtccgctaccaccggccaggatctgctgctgatcaccgtgctgaagggcgcggtgctcttcgtcaccgacctggcgcgagcgattcccgtgccgacccagttcgagttcatggcggtgagttcgtatgggtcatcgacatcctcgtcgggcgtggtgcggatcctcaaggacctcgaccgcgacatccacggccgcgacgtgctgatcgtcgaggacgtcgtcgactccggccttacgctttcgtggttgtcgcggaacctgacgagccggaatccgcggtcattgcgggtgtgcacgctgctgcgcaagcccgatgcggtgcacgccaacgtcgaaatcgcgtacgtgggtttcgacattcccaacgacttcgtcgtgggctacggcctggactacgacgaacgctaccgtgacctgtcatacatcgggacgctggaccccagggtctatcagtag

SEQ ID NO: 956 - DNA, 726 bp, Tuberculosis
atggcctcgaaaatggacactgaaacgcactactcggacgtctgggtcgtcattcccgccttcaacgaagccgccgtgatcggcaaggtcgtcaccgatgtgcggtcagtcttcgaccacgtcgtctgcgtggacgacggcagcaccgacggcaccggcgacatcgcccggcggtccggtgctcacctcgtacgccatccgatcaacctgggccagggggcggccattcagaccggaatcgagtacgcccgcaagcagccgggcgcccaggtctttgccacctttgacggcgacggccagcaccgcgtcaaagacgtggccgcaatggtcgaccggctcggcgcaggtgacgtcgatgtggtgatcggaacgcggttcggccggcccgtgggcaaagcttcggccagccgaccgccactgatgaagcggatcgtgctgcagacaggagcgcggttgagccgtcgaggccgccgacttggcttgaccgacaccaacaatggcctgagggtgttcaacaagaccgtggccgacgggctgaacatcaccatgagcggcatgagccacgccaccgagttcatcatgttgatcgccgaaaaccattggcgggtagcggaagaaccggtcgaggtgctctacaccgagtattcgaagtcgaaaggccaaccgctgctcaacggcgtcaacatcattttcgacgggtttctgcgagggaggatgccacgatga

SEQ ID NO: 957 - DNA, 567 bp, Tuberculosis
atggcgggtctcttcacgcccccggcttccggtgccgcgacacttcagcgtgctgcgcgagatgctgccccggacgcgcgctggctactcgcggtctccgaccgcaacgggatcgtcagcacttcggcgacgacgtgcaactacccgcccgctgcgaaagactctgcgcaagacgggtttaggcacgcactggccgctgccatcgctgcggacatcgatgaagcactccgtcacggctacggagatctgcttgagcttgcgtacccgctcatgagctggccgcgccggggcgtttttggcgggccgaccccggccccacgtgggctcgctacgcgacagtgcccgccccggacagttcacgttgaccgggtgaggccaaacggcgccgagcgtgcactgagggcgagattccggccgattctccgccctcagttcacgctgggcgacggcgctaacgggctgcccttggccgcgtgcaccaagacgggtgcatacgtgccgcacttgccatactcacccatcgcggtggacccccaacccagtgccggtcaacaagggccttcctga

SEQ ID NO: 958 - DNA, 207 bp, Tuberculosis
atgttggtgatcaccatgtttcgtgtactcgtggcgcggatgacggcgctggcggtcgacgagtcgggcatgtccaccgtggaatacgccatcggtaccatcgcggcggctgccttcggtgcgatcctctacacggtcgtcaccggggattccattgtgtcggcgctcaaccgcatcatcggtcgcgcgctcagcaccaaggtttag

SEQ ID NO: 959 - DNA, 675 bp, Tuberculosis
gtggacgagatcctggccagggcaggaatcttccaaggcgtggagcccagcgcaatcgccgcactgacgaaacagctgcagcccgtcgacttcccccgtggacacacggtcttcgcggaaggggagccgggcgatcggctgtacatcatcatctcggggaaggtcaagatcggtcgccgggcaccagacggccgagaaaacctgttaaccatcatgggcccgtcggacatgttcggcgagttgtcgatcttcgacccgggtccgcgcacgtccagcgcgaccacgatcaccgaggtgcgggcggtgtcgatggaccgcgacgcgctgcggtcatggatcgccgatcgtcccgaaatctccgaacagctgctgcgggtgctggcccgccggctgcgccgcaccaacaacaacctggccgacctcatcttcaccgatgtgcccggtcgggtggccaagcagctgttgcagctcgcccagcgtttcggcacccaggaaggtggcgcattgcgggtcacccacgacctgacacaggaagaaatcgcccagctggtcggggcctcacgcgagacggtgaacaaggcactggctgatttcgctcaccgcggctggatccgccttgagggcaagagtgtgctgatctctgactccgaaagactggcccgccgagcgaggtaa

SEQ ID NO: 960 - DNA, 369 bp, Tuberculosis
ttgtcagctcccgactcgatcaccgtcacggttgccgaccataacggggtcgccgtgctcagcatcggtggtgagattgatttgatcaccgctgcggcacttgaagaggccatcggcgaagttgtggccgacaatccgacggcgctagtcatcgacctttccgcggtggagtttctggggtcggtggggctgaagattttggcggcaacatccgaaaagataggccaatccgtcaagttcggggtggttgcacggggttcggtaaccagaaggccgattcatctgatgggtctggacaagacctttcggttgttttccacgctccacgatgccttgactggggtacggggcggcaggatcgaccggtaa

SEQ ID NO: 961 - DNA, 966 bp, Tuberculosis
gtggtgcgtatcgcttacctcggtccggaagggacattcaccgaggcagccctggtccggatggtggccgccggcctagttcccgagaccgggcccgatgcactgcagcggatgccggtcgagagcgcgcccgcagcactggctgcggtccgcgacggcggtgcggattatgcgtgcgtgccgatcgagaactcgatcgacggttccgtgctgcctactttggatagcctggccatcggtgtgcgcctgcaggtgttcgccgagacaacgctggacgtgacgttcagcatcgtggtcaaacccgggcgcaacgccgcggacgtgcggaccctggcggcctttccggtggcggctgcacaggtgcggcagtggttggcggcccatcttcccgccgccgacctgcggccggcttattccaacgcggacgcggcccggcaggtggctgacggcttggttgacgccgcggtgacctcgccgctggcggccgctcgttggggattggcggccctggccgacggtgtcgttgacgaatccaatgcccgcacccgcttcgtcctggttggtcggcccgggccgcctccggcgcgcaccggagccgatcgcacgtctgcagtgctgcgcatcgacaaccagcccggtgcgctggtagctgcgctggccgagttcggcatccgcggcatcgatctcactcggattgaatcccggcccacccgtaccgaacttggcacctatctgttcttcgtggattgcgtcggccacatcgacgacgaggccgtcgccgaggcactcaaggcggtgcaccgacgttgtgctgatgtgcgatacctggggtcctggccgacggggccagcggcaggggcgcagccgcccctggtagacgaagcatcacgctggttagcgcggctccgcgcgggcaaacccgagcagaccctggttcgcccggacgaccagggggcgcaagcatga

SEQ ID NO: 962 - DNA, 2190 bp, Tuberculosis
atgagtattaccaggccgacgggcagctatgccagacagatgctggatccgggcggctgggtggaagccgatgaagacactttctatgaccgggcccaggaatatagccaggttttgcaaagggtcaccgatgtattggacacctgccgccagcagaaaggccacgtcttcgaaggcggcctatggtccggcggcgccgccaatgctgccaacggcgccctgggtgcaaacatcaatcaattgatgacgctgcaggattatctcgccacggtgattacctggcacaggcatattgccgggttgattgagcaagctaaatccgatatcggcaataatgtggatggcgctcaacgggagatcgatatcctggagaatgaccctagcctggatgctgatgagcgccataccgccatcaattcattggtcacggcgacgcatggggccaatgtcagtctggtcgccgagaccgctgagcgggtgctggaatccaagaattggaaacctccgaagaacgcactcgaggatttgcttcagcagaagtcgccgccacccccagacgtgcctaccctggtcgtgccatccccgggcacaccgggcacaccgggaaccccgatcaccccgggaaccccgatcaccccgggaaccccaatcacacccatcccgggagcgccggtaactccgatcacaccaacgcccggcactcccgtcacgccggtgaccccgggcaagccggtcaccccggtgaccccggtcaaaccgggcacaccaggcgagccaaccccgatcacgccggtcacccccccggtcgccccggccacaccggcaaccccggccacgcccgttaccccagctcccgctccacacccgcagccggctccggcaccggcgccatcgcctgggccccagccggttacaccggccactcccggtccgtctggtccagcaacaccgggcaccccagggggcgagccggcgccgcacgtcaaacccgcggcgttggcggagcaacctggtgtgccgggccagcatgcgggcggggggacgcagtcggggcctgcccatgcggacgaatccgccgcgtcggtgacgccggctgcggcgtccggtgtcccgggcgcacgggcggcggccgccgcgccgagcggtaccgccgtgggagcgggcgcgcgttcgagcgtgggtacggccgcggcctcgggcgcggggtcgcatgctgccactgggcgggcgccggtggctacctcggacaaggcggcggcaccgagcacgcgggcggcctcggcgcggacggcacctcctgcccgcccgccgtcgaccgatcacatcgacaaacccgatcgcagcgagtctgcagatgacggtacgccggtgtcgatgatcccggtgtcggcggctcgggcggcacgcgacgccgccactgcagctgccagcgcccgccagcgtggccgcggtgatgcgctgcggttggcgcgacgcatcgcggcggcgctcaacgcgtccgacaacaacgcgggcgactacgggttcttctggatcaccgcggtgaccaccgacggttccatcgtcgtggccaacagctatgggctggcctacatacccgacgggatggaattgccgaataaggtgtacttggccagcgcggatcacgcaatcccggttgacgaaattgcacgctgtgccacctacccggttttggccgtgcaagcctgggcggctttccacgacatgacgctgcgggcggtgatcggtaccgcggagcagttggccagttcggatcccggtgtggccaagattgtgctggagccagatgacattccggagagcggcaaaatgacgggccggtcgcggctggaggtcgtcgacccctcggcggcggctcagctggccgacactaccgatcagcgtttgctcgacttgttgccgccggcgccggtggatgtcaatccaccgggcgatgagcggcacatgctgtggttcgagctgatgaagcccatgaccagcaccgctaccggccgcgaggccgctcatctgcgggcgttccgggcctacgctgcccactcacaggagattgccctgcaccaagcgcacactgcgactgacgcggccgtccagcgtgtggccgtcgcggactggctgtactggcaatacgtcaccgggttgctcgaccgggccctggccgccgcatgctga

SEQ ID NO: 963 - DNA, 1383 bp, Tuberculosis
atgacgcagtcgcagaccgtgacggtggatcagcaagagattttgaacagggccaacgaggtggaggccccgatggcggacccaccgactgatgtccccatcacaccgtgcgaactcacggcggctaaaaacgccgcccaacagctggtattgtccgccgacaacatgcgggaatacctggcggccggtgccaaagagcggcagcgtctggcgacctcgctgcgcaacgcggccaaggcgtatggcgaggttgatgaggaggctgcgaccgcgctggacaacgacggcgaaggaactgtgcaggcagaatcggccggggccgtcggaggggacagttcggccgaactaaccgatacgccgagggtggccacggccggtgaacccaacttcatggatctcaaagaagcggcaaggaagctcgaaacgggcgaccaaggcgcatcgctcgcgcactttgcggatgggtggaacactttcaacctgacgctgcaaggcgacgtcaagcggttccgggggtttgacaactgggaaggcgatgcggctaccgcttgcgaggcttcgctcgatcaacaacggcaatggatactccacatggccaaattgagcgctgcgatggccaagcaggctcaatatgtcgcgcagctgcacgtgtgggctaggcgggaacatccgacttatgaagacatagtcgggctcgaacggctttacgcggaaaacccttcggcccgcgaccaaattctcccggtgtacgcggagtatcagcagaggtcggagaaggtgctgaccgaatacaacaacaaggcagccctggaaccggtaaacccgccgaagcctccccccgccatcaagatcgacccgcccccgcctccgcaagagcagggattgatccctggcttcctgatgccgccgtctgacggctccggtgtgactcccggtaccgggatgccagccgcaccgatggttccgcctaccggatcgccgggtggtggcctcccggctgacacggcggcgcagctgacgtcggctgggcgggaagccgcagcgctgtcgggcgacgtggcggtcaaagcggcatcgctcggtggcggtggaggcggcggggtgccgtcggcgccgttgggatccgcgatcgggggcgccgaatcggtgcggcccgctggcgctggtgacattgccggcttaggccagggaagggccggcggcggcgccgcgctgggcggcggtggcatgggaatgccgatgggtgccgcgcatcagggacaagggggcgccaagtccaagggttctcagcaggaagacgaggcgctctacaccgaggatcgggcatggaccgaggccgtcattggtaaccgtcggcgccaggacagtaaggagtcgaagtga

SEQ ID NO: 964 - DNA, 747 bp, Tuberculosis
gtgtccgacggcgaacaagccaaatcacgtcgacgccgggggcggcgccgcgggcggcgcgctgcggctacagccgagaatcacatggacgcccaaccggccggcgacgccaccccgaccccggcaacggcgaagcggtcccggtcccgctcacctcgtcgcgggtcgactcggatgcgcaccgtgcacgaaacatcggctggagggttggtcattgacggtatcgacggtccacgagacgcgcaggtcgcggctctgatcggccgcgtcgaccggcgcggccggctgctgtggtcgctacccaaggggcacatcgagttgggcgagaccgccgagcagaccgccatccgcgaggtcgccgaggagaccggcatccgcggcagtgtgctcgccgcgctggggcgcatcgactactggttcgtcaccgacggccggcgggtgcacaagaccgtccaccattatttgatgcggtttttaggcggagagctgtccgacgaagacctcgaggtagccgaggtagcctgggtgccgatccgggaactgccgtctcgactggcctacgccgacgaacgtcgactagccgaggtggccgacgaactgatcgacaagctgcagagcgacggccccgccgcgcttccgccgctaccacccagctcgcctcgtcgacggccgcaaacgcattcacgcgctcgtcatgccgatgactcagcaccgggtcagcacaacggtcccgggccggggccgtga

SEQ ID NO: 965 - DNA, 735 bp, Tuberculosis
gtgtccgctcgtatcacagcgttacgactcgaagccttcgagcagctccccaagcatgcgcgacgctgcgttttctgggaggtcgaccccgcgattctcggcaaagacgaccacctcgccgaccccgaattcgaaaaggaagcctggttgtcgatggtgatgctggagtggggttcgtgcggtcaggtcgcaacggcagtcccggatgagcgcagccacgccgaaccaccctgcctcgggtatgtgctctacgctccgcccagtgcggtgccgcgagcccagcggtttcctaccgcgccggtgtcggcggacgcggtgctgcttacgtcgatgggcatcgagcgcgggcaagcagatgacgacttaccgcacagtctgattgcccgggtgattgaagagttggttcggcgcggcgtccgggcgctggaagctttcggccggacaccagcggccaccgatttgcaaaacccgggcgcggtaacacctgatgtgcggccggtgttggaggccctcggcgactgctgtgtcgaacactgcatcatcgacgcgaacttcttgatggacgtgggtttcgtcgtggtggcaccgcacccgtactttccgaggctacgcctcgaactggacaaagggctggggtggaaagccgaagtcgaggccgctcttgaacgcttgctggagaatgctcgactgcaagagccgatagcagcggggtcgacggccggcaacacgtcgtaa

SEQ ID NO: 966 - DNA, 2004 bp, Burkholderia pseudomallei
atgtccaataccctcatgaacctcggggtcagcggcttgaacgccgcgctctggggtctcaccacgaccggccagaacatcagcaatgcggcgacgcccggctattccgtcgagcgccccgtctatgcggaagcgagcggccagtacacgagcagcggctatctgccgcagggcgtgtcgaccgtcaccgtcgagcgccagtacaaccagtacctgtcgaaccagctgaacgccgcgcagacgcagggcagctcgctgtcgacctactacacgctcgtcgcgcagctgaacaattacgtcggcagcccgacggccggcatcgcgaccgcgatcacgaactacttcaccggcctgcagacggtcgcgaacaacgcggcggacccgtccgcgcgccagaccgcgatgagcaacgcgcagacactcgcgagccagctcgtcgccgccggccagcaatactcgcaactgcgccagagcgtgaattcgcagctcaccgacaccgtcacgcagatcaacagctacacctcgcagatcgcgcagttgaacgagcagatcgcgtcggcgagctcgcaaggccagccgccgaaccagctcctcgaccagcgcgatctcgcggtgtcgaagctctcgcagctcgcgggcgtgcaggtcgtgcagagcaacggcaactacagcgtgttcctgtcgggcggccagccgctcgtcgtcggcaatgcaagctatcagcttgcgaccgtcgcttcgccgtccgatccgagcgagctcacgatcgtatcgaagggcgtcgccggctcggcccagccggggcccacgcaatatctgcccgacgtgtcgctcacgggcggcgcgctcggcggcctgctcgcgttccgcagccagacgctcgatcccgcgcaggcgcagttgggcgcgctcgcggtcagcttcgcgtcgcaggtcaacgcgcagaacgcgctcggcgtcgacatgtccggcaatccgggcggcagcctgtttgcggtcggcgcgccggccgtctacgcgaaccagaacaacaccggcagcgcgacgctgtccgtgtcgttcgtcgacggcacgcagccgacgacgagcgactacgcgctgtcgtacgacggcgcgaagtacacgctgacggaccgcgcgacgggcagcgtcgtcggcacggcgacgccgagctccacgccgccgacgatgacgatcggcggcctgaagctgtcgctgtcgagcacgcccaacgcgggcgattcgttcaccgtgctgcccacgcgcggcgcgctcgacggcttctcgctcgccaccgcgaacggctcggcgatcgcggccgcctcgcccgtgctcgccgcgggcgtcgcgacgaacagcggcacgggcgtgatctcgcagggctcggtgagcgcgggctaccagttgccgtcgggcacgacgacgctcgcgtacaacgcggcgtcgaagacgctgtcgggctttccggtcggcacgacggtgacgatcgcgggcacgccgccgacgtcgatcaacatcacgagcgcgacgacgcccgtgccgtacgatccgtcgaagggtgcgtcgatgacgatctcgagcacgacgcagccggcgccgtcgggcgtgatgaacggcgtgagcgtgtcgctgtcgggcacgcccgcggacggcgaccagttcacgatcggcgcgaacaagggcaccaacgacgggcgcaacgcgctcgcgctgtcgcagctcgtgaactcgaagacgatgaacaacggcacgacgacgctcacgggcgcctacgcgggctacgtgaacgcgatcggcaacgcggcgagccagctgaaggcgtcgagcgccgcgcagacggcgctcgtcggccagatcacgcaggcgcagcaatcggtgtcgggcgtgaaccagaacgaggaagcggcgaacctgatgcagtaccagcagctgtatcaggcgaacgcgaaggtgatccagacggcgaactcggtattccagaccgtgctcggtctcttcaactga

SEQ ID NO: 967 - DNA, 582 bp, Burkholderia pseudomallei
atgaaatcactgtttcgtccgctcatcgtcgtgttcgtcgtgctggtcgccgtcacggggctcgcgtatccggccgtgatgacggtcttcgggcaggccgtgttccccgcgcaggcgaacggcagcctcatcgagaagggcggcagggtcgtgggctccgcgctgatcggccagcagttcgacgcgccgcagtacttctggggccgcctgtcggcgacgagcccgatgccgtacaacgcggcgggctcgggcggctcgaatctcgggccgctcaaccctgcgctgaaggatcaggtgaagagccggctcgacgcgctgaaggcggcgggcaccgatctgtcgcagcccgtgcccgtcgatctcgtgacggcctcggcgagcgggctcgatcccgagatcagcccggccgcggccgactatcaggtcgcgcgcgtcgcgcgtgcgcgcaagatggcggacgccgacgtgcgccgcctcgtcgccgaccacacgtccggccgccagttcggcgtgctcggcgagccgcgggtgaacgtgctgaagctcaatctcgcgctcgacgccgcgcaggccgcgcattga

SEQ ID NO: 968 - DNA, 1392 bp, Burkholderia pseudomallei
ttgaatgacgccatgcctaaccgattccgaccgtttcccgccctgtccgccgttgcggtggcggccgtgttgtccgcctgttcgtcggcgcccaagcctctttatcagcaggaacagttcgacgcgaccacgagcccctacgcgcgcacgttccacgaaaaatcggccgcgacgtgcgaagccgcgcgccgcgcgctgctgagccagggctacatggcgagcgcgacgcgcccggacgcggtcgacggcagcaagaacttccagccgagcaacgattcgcacgtcgtcatcgaatttcacgtcgtctgcgcggaggcggacgtcgacggcgcatcgagcatcgcgtacgtgaacgcggtgcaggaccgctattcgctgaagaagagcaacacgtcggcgagcgtcgggctgagcgtgttcggctcgctgtcgctgccgatcggctcgagcgacgacgcgatggtcaagatcgcgagcgaaaccattccggccggcgtgttctacgagcgcttcttcaatctcgtcgaccatttcctgaagatcgatccgacgcggcgcgacaaggcggccgtcaaggcggccgagaaggagcgcgtcgcgccgctgcccgaaccggcggagacggccgaaggcgcgccgatgaagctgaagacgccggccgcgccgacgccgccggccgcgcccgtgccggcgtcctcggccgcgcccgggacgtcggcgtcgtcggccgtggctgcgccggcggccgcgggttccgggccggccgcttcggcccccgccgcccccgttaggcacgccgcgcctgcgccggcttcggcgacggccgccgcatcggcacccaccgcggcatccgcgccggcgcctacgcccgcgtcggctcccgcgccggcttccacacccgcccccgcgtccgcgccgacaccggcgtccgctccgactccgactcccgcttcagctccgactcccgcttcgattcctgccccggctccagcgtcggccccggcttcaactccagccccggcttcggctccagccccggctccgacaacgaacccggcgtcatcgatcgcgccggcggccgcgccattcgcctcggcgatcccgcctgcgcgcgccgagaagttcgccccggcggtgacggcgacgacagccggttcggcatcgacgccggcctcggccgccgcgccgtcgtcgccgtcgtcgccgtggctgccgcccttgctgccgcccttgctgtcgcccgacgcgccgtcgcccccggcggacaccgcgcggacggcgccgctcgcgccggcggcatcgccggcaaccgccgcggccgcagcgacgaacgccaccgcgaccgccggcgcgatgcaatccgccccccgcgacgacgccgcgacgaactga

SEQ ID NO: 969 - DNA, 1215 bp, Burkholderia pseudomallei
atgttgcgtctttcgctgtccgttctcgtgatttcgctgctcgcggcctgctcgagcgtgccgcccaagtcggcgcgctcgtcgtccggcatggcgatcaccacgccgcgcgcgtacgcgccgccgcgcggctttccgaatttcgtcgaccatagcgtcggccgcgaggaaatctcgatccaggcgatgagcctcgtcggcgtgccgtaccgttggggcggcaacacgcccgacagcggcttcgactgcagcgggctcgtgcgctatgtcgtcgatcgcgcggcgagcgtgaatctgccccgcacgaccgccgacatgagctcgatcggcgaatcgatcgagcccgacggcatcgcgccgggcgatctgatcttcttcaatacgtcggggcggccgcattcgcacgtcggcatctacgtcggcaagctgcgcttcgtgaacgcgccgtcgacgggcggcaccgtgcggctcgactatctgacgaatccgtattgggcgaagcgcttcgacggcatccggcgcgtcgcggcgccgaaggcgaagccggcgccgttcgatgcgccgacctatcaggcgagccggccgccggaacccgcgccgcgcgtgagcccggcagccgcggcgccggcctatgcggcagtcaatgcgccggcggcgtccgccgcacgcgcggcagcgccctccgcgcccggctatgcggcgaactcggcgacgccggccgcggcacgcgccgcagcaccgccgccatcgtccgaatatgccgcccactccgccgctgcgatggcctcagccccggcctcggccgcgccgctgcccaacgccgtgccggctgcggcaaccgccgcaaccgccgccgatccgtacgagccgccgccgtccgcgatgtccgccgcgcgccggcaagcgcaggctgccggcgcgcgttcgcccgtgctcgcggccggcaacccgggcggcgcggtgccgccggccgcgccgcccgccggcggtccgacgagcatggccggcgcatcggcggccgatccgatcgacgccgccgcggacgcgttcgagccgccgccgcccaccgcgcgcgcggccgctcgccaggcgcaactcgccgcgcccggcaacgtgcaggtcctgcgcgcgtcgacagccggcagcgccgcaagcgccgccgcaaccggctcgaacgacgacccgatcgcccgcttcgcgaacggcggttattga

SEQ ID NO: 970 - DNA, 495 bp, Burkholderia pseudomallei
atgaagcttcgaaacctgtcgatcaccgccgccgccttcgcgctcgcattcggcctgtccgcctgcggccagcgcgacgccggcgcgccgcccgccgccgccgcgtccgcatcgatcgcgccggccgcctccgtcacgctcgacgcatccgcgaacgcgagcccgtcggccgcatccgcgcccgccgcgtcgagcgaggcggcgcccgccgccacgacggccgccgccgcggatacgccgaaccccggcggcgagaaggtgttcaagagcgtgtgcttcatgtgccaccagacgggcgcggccggcgcgccgatcgccggcaacaaggacgattgggcgccgcgcatcgcgcaaggcaagccgacgctgtacaagcacgcgctcgaaggcttcaccggcaacaagggcacgatgccgccgcgcggcggcaacccgagcctgaaggacaacgaagtcgaagccgccgtcgacttcatggtcgccaaggcgcactga

SEQ ID NO: 971 - DNA, 966 bp, Burkholderia pseudomallei
ttgaaacgcgaacggcgtgcgcggcgctcccgcctgcccgcggcggcaggcggcctgtggcttgtcgttgccgcgctgccgcccggcgcacgggcagcgacttgcgaaggcgacaagacactcgtcacgcttccggccatcgcggtcgcggccgacgcgccggtgggaacggtgctgtggcgtcagaaggggatcgctttcagcacctattgcacgttgggatggttcgacaccagcaacatttatgtctggcgcgccgacctgcgctcggcgctgcagccatatgggctgacgttctggctgacttacggagggcagggcggcaacaccgcgctgcaaatcaaggagccgatggtcgtcgatctcggcggaaaggccggttatgcgagcggctccgtcgacctggaactgaggaagacgggcgtgacgccggcgcaaggcgtcgtcggcgcggcggacatccccgcgttctatctcgatagcaatacgaactacaacaaaggctcgcactacatccgcgggctgaccaacatttcgttcgtctcctatacctgcgacatcgatacggggtcgcgcagcatgaacgtgccgctcggcgacgtgcgcgtcgatcgcttcagcggcatcggctccaccttcgcggatcggaatttcggcatcggcatgacgtgcacgcagccggccggcacgtacgatatcgcgctgacgttttccgcgacggcggacagctccggcgcaccgggcgtgctcgcgatcacgcagggggcgtcttccgcgtccggagtcggcattcagttgctgatgaacggctcgccggtgactttcggcgccgtcctcgacgcgggcagcgcgaccgcgggcgcgacgctgacgatcccgatgacggcacgctattatcagaccggcagtgtcgtgacgccgggcgcggcgaacgggatcgcaacattcgccgtcagctacaaatga

SEQ ID NO: 972 - DNA, 2586 bp, Burkholderia pseudomallei
atgaacaggattttcaaatcgatctggtgcgaacagacgcgtacgtgggttgcggcatcggagcatgccgtagcgcgcggtggccgcgcgtcgagcgtcgtcgcgtccgccggcggattggagaaagtgctcaagctgtcgattctgggcgcggcatcgctgattgcgatgggcgtggtcggaccgtttgccgaggaggcaatggcggcgaataacgccggtgtgtgtttgacgtacaacggtagtagcaacaatacatcaggtactggcggctggttcgctgatggttgtaaatcggccggctgggtgcagggcatggttacgaatagcaagacggattgggtcgggctgaccgcggacgacacgcagatcgtgctcgacggtagcgcgggcagcatttacttccggacgggcggcataaacggcaacgtgttgacgatgtcgaacgcgaccggcggcgtattgctcagcggcctcgcggccggcgtcaatccgaccgatgcggtcaacatgtcccagttgacctcattgtcgacgtcgacggcaaccggcatcacctcgctttcgacgtcgacggcaaccagcatcgcttcgctttcgacgagcatgctgtcgctcggcgtgggcgtcgtgacgcaagacgcctcgaccggcgcgatcagcgtcggcgccaattcgccgggcctgacggtggatttcgcggggggccagggcccgcgcacgctgacgggcgtcgccgcgggcgtcaacgctacggacgcggtcaatgtcggccagttggcgtcgctgtcgacgagcacggcagcggggctttccactgccgcgagcggcgtcgcgtcgctgtcgacgtcgctgctcggcgcggtgggcgatctggcgtcactgtcgacgagcgcatcgacggggctcgccactgcggatagcggcatcgcgtcgttgtccacgtcgctgctcggcaccgcggacaacgtgacgtcgctgtcgacgagcctcagcacggtcaacgcgaatctggccggcctgcagacctcggtggacaacgtcgtgtcatacgacgatccgtcgaagtcggcgatcaccctcggcggtgcgggcgtcacgacgcccgtcctgctgacgaacgtggctgcggggaagatcgccgcgaccagcacggacgcggtgaacggttcgcagctttacacgctccagcaggagttctcgcagcagtacgatctgctgacgtcgcaagtctcgtcgctcagcacctcggtgtcgggtctccaaggcagcgtctcggcaaatacgggaaccgcgtcgggtgacaacagcacggcgagcggtgacaacgcgaccgcgtcgggcacgaacagcacggccaacgggacgaactcgaccgcgtcgggtgataacagcacggcaagcgggacgaatgcgtcggcgagcggcgagaacagcacggcgacgggtacggactcgaccgcatcgggcagcaacagcacggccaacggcacgaactcgaccgcgtcgggcgataacagcacggcgagcgggacgaacgcatcggcgacgggtgagaacagcacggcgacgggtacggactcgaccgcatcgggcagcaacagcacggccaacgggacgaactcgaccgcgtcgggcgataacagcacggcgagcgggacgaatgcgtcggcgagcggcgagaacagcacggcgacgggtacggactcgaccgcatcgggcagcaacagcacagccaacgggacgaactcgactgcgtcgggcgataacagcacggcgagcgggacgaacgcatcggcgacgggtgagaacagcacggcgacgggcacggattcgaccgcatcgggcagcaacagcacggccaacggcacgaactcgaccgcgtcgggcgataacagcacggcgagcggcacgaatgcatcggcgacgggtgataacagcacggcgagcggcacgaacgcatcggcgaccggtgagaacagcacggcgacaggcacggattcgaccgcatcgggcagcaacagcacagccaacggcacgaactcgaccgcgtcgggcgataacagcacggcgagcggcacgaacgcatcagcgaccggtgagaacagcacggcgacgggtacggactcgaccgcatcgggcagcaacagcacggccaacggggcgaactcgaccgcatcgggcgataacagcacggcgagcggcacgaacgcatcggcgacgggcgagaacagcacggcgacaggcacggattcgaccgcatcgggcagcaacagcacggccaacggaacgaactcgactgcgtcgggcaacaacagcacggcgagcgggacgaacgcgtcggcgacgggtgaaaacagcacggcgacgggtacggactcggccgcatccggtacgaatagcacggccaacggcacgaactcgaccgcgtcgggcgataacagcacggcgagcgggacgaatgcgtcggcgaccggtgagaacagcacggcgacgggtacggcttcgaccgcgtcgggcagcaacagcacggccaacggtgcgaactcgacggcatccggcgcgggggcgacggcaacgggtgaa

SEQ ID NO: 973 - DNA, 939 bp, Burkholderia pseudomallei
atgcgtatcgtcatcgcattgggcggcaacgcgctcttgcagcgcaatcagccgatgaccgaagtccagcagcgcgagaacgtgaagatcgcggtcgcgcagatcgcgcagatcgcgccgggcaacgagctcgtgatcgcgcacggcaacgggccgcaggtcggcctgctcgcgctgcaaggcgcggcgtaccccgcggtcgcgccctacccgctcgacgtgctcggcgcgcagacggaagggatgatcggctatctgatcgaacaggaaatgggcaacctgctgccgcccgacgcgccgttcgcgacgctgctcacgcaagtcgaggtggacccggccgatccggcgttcgagcatccgaccaagccgatcggccccgtctactcgcgcgacgaggccgagcggctcgcgcaggaaaaaggctggcacatcgcgcccgacggcgacaagttccgccgcgtcgtgccgagcccgcggccgcggcgcatcttcgagatccggccggtgaagtggctgctcgagaaaggcacgatcgtgatctgcgcgggcggcggcggcattccgacgcgctacgacgcgaacggcaagctctcgggcgtcgaggcggtgatcgacaaggatctgtgcgcgtcgctgctcgcgcgcgaattgagcgcggacctgctcgtgatcgcgaccgacgtcgacggcgcgtacctcgactggggcaagccgacgcaagcgctgatcgaggccgcgcatccggacgaactcgagcggctcggcttcgcggccggctcgatggggccgaaggtgcaggcggcgatcgaattcgcgcggcagaccggccatgacgcggtgatcggctcgctcgccgacatcgtcgcgatcgccgaggggcgcgccggcacgcggatcagcgtgaaggtcgacgggattcgctaccgccggccgcggtga

SEQ ID NO: 974 - DNA, 1590 bp, Burkholderia pseudomallei
atgaacatcaacacgatttcccatggcacgctccggacgactttgatcgcggccaccgtggcagccatgctctccctctccgcttgcggcggctccggcacgatcagcaagggcctcgacggctcgggctccggcagcggcggcggcaatgcgatttccacgacgggcggctccggctcgggcggcacgagcggcgcgggcggctcgggttcgggcggcagcggcagctccggctcgacgggcggcctgtcgggcggcggcggctcgacctccggcggcggctccacgtcgggcggcggctcgacctccggcggcacgtcgacctcgtcgagcatcaacgcgctcggcacgatcgccggcaacacgggcggcatcatcagcggcgccggctcgaccgtgtcgggcctcggcaccgtcgtcggcagccagacgctgcccggcgtgaacccgcaaacgacgcaagcgctcggcggcatcgtgcaggatctcggcggcgcggtcagcgcgctcggctcgggcgtgacgagcggcatcggccagctcggttcgtcgaccaacccgatcggcacgacggtcgcgagcacgggcggcgtggtcagccaactgggcggcgccgtcacgcagacgggcaacctcgtgacgagcctcggcaccggcccgctcgcgccgctcgccccgctcacgtcgccgctcggcggcgcggtcagcacgctcggcaacacgatcacggcgggcggcacgacgctcaccaccgcgctgtcgacgggccccgtccagcaactgacgcagacggtcagctcggcgatcacgccgatcacgtcgatggtcacgggcacgacgcagacggtcggcaacgtgacgggcctcggcgcgcccgtcaacacgctgctcggcacgatcggcggcgggctgaaccaggccggcgcgctgatctcgaagacgggcaacaacccggtcacgacgggcctcggccaaacggtgtcggcgacgggcaacacgatcacgtcggtcggcggcctgctgacgggcggcagcggcgcgacgaacccgctcgcgccgatcacggccgccgtcggcggcctgacgggcacgctcagcggcgtcagcggcgcaacctcgggcaccccgctcgcaccgctcacgaacgtcgtgtcgacggtcaccggcgcgctctccggcgccaccggcggcgcgacgtcgacgagcccgctcgcgcccatcacgggcctcgtgtcgacggtcaccggcgcactctccggcgccaccggcggtacgacgggctcgaccagcccgctcgcgcccgtcaccggcctcgtgtcgaccgtcaccggcgcgctctccggcgccaccggcggcacgacgtcgacgagcccgctcgcgcccgtcacgaatctcgtgtcgaccgccacgggcgcgctcggcggcgcgaccgccgcgccggcgacgagcacgacgacgagcgcgacgaacccggtcgcgagcctcacagcaccgttgaccggcacgagcagcggcacgagcggcgcgaccaacctgctggcgcccgtcacgtcgctcgtcggcggcctgctcggcggcatcaagaagtaa

SEQ ID NO: 975 - DNA, 1266 bp, Burkholderia pseudomallei
atgacccagcaacgtttcgccccatcgttcgcgctcgcggcctggggcgttccgctcaccgcactcgccaccgtgtgcgtgctcgccgcgtgcggcggcagcgacgtcaccgcgccgccgtccgccggcggcggcacgagcgggaccagcggcacgagcggcacgagcggaaccagtggcacgagcggcaccagcggcacggcgggcacgtcgggcgtcgtcaacacgctcggcaagacggcgaccgatctcggcaacacgatcagctcgacgagcgtgccgggcctcggcagcggcgtgacgcagggcgtcggcgcgacggtcggcagcacgggcggcatcatcaacgccgcggcggatgcgctcagcaacggcctcggccagaccggctcgacgcagaacccggtcggcacgacggtcgcgggcctcggcaacgtcgtgagcgcgacgagcaacaccgtgcagggtctcagccagaccgtgcaagcgctcggcacgggcccgctcgcgccgctgtcgcccgtcacgacgcctgtcgcgggcgcgctcgcgacggcggccaacggcgtgaacgcggccggcacgatgctcggcaacgcgctgtcgacggggcccgtccagcaagtcacgcagccgatcagctcggcgctcacgccgctcgtcatcacggcgggccaggtcacgcagacggtcggcacgacgacgggcgtcggccagccggtgtcgggcctgctgcagcaagtcggcggcgcgatcagctcggccggcacgcagatcgcgggcacgtcgccgtcgcagccgctcgtcggcgacgtcggccagctcgtgtcggcggtcggcaacaccgtgacgaacgcgggcggcctcgtgaacccggccgcgccgaacggcgcggcgccgatcccgggcctcatcacgagcgtcgtcggcggctcgacggcgacggtcgccaccggctccagttcgggctcgacgctcggcagcccgctgaacggcctgctgtcgagcctcggcggcggcgccctgccgagcggcccgctcggcggcagcgcggtgtcgggcggcgcgagcaacccgctcgcgccgatcacgagcctcgcgagcggcggcacgggagctagtacaaacccgctcgcgcccgtcacgggtttgctcaatactgtcaccggcacgctgtccggcgcgacgtcgtcgacaggcggctcgacggggctcctcgctcccgttaccggttcgctcggcacgctgggcagctttggtaagtga

SEQ ID NO: 976 - DNA, 2121 bp, Burkholderia pseudomallei
ttgcgctcgtgcgccggaaccgctgtcacgctcgccgttctgagtgcgggatgcgcggaatcgacgcccaaatccggcaacggcggcgccgcgtcgacggcgatcgagcgcacgaaagccgatcgtctcgcgcgcgaacagcagaccgcgcggaccgtgccgacgctcgcgtcgatcaaggtcgaccagccgcgcccgctcacgctgcgcgattcaggccaaagcggcacgctcgcgttcctgcgcgaagtcgatttccgcatcgtcggcgatctcggcttcctcgttcacgagctgtcggcgacgctcgtgccgacgcatcccggcgcccccaccgtgttcgatgatccgacgagcttcgacatcgccgtgcaccgcggcaccgtgacgctcgacaacaccaaactcaatgcgctgttcggcggctacatcttcggctatcgcaacgcgccgttgcgcaacgtgcgcgtgagcgcgggcgacggcttcctcgacatccgcggcgaaatgcagcgcgacggctgggtgccgttcgcgctcaaaggcaagctggagatccgcgacggctcgacgctcgtgttccacccgaccgacgtgcacgtatcgggcatcgaagcgggccccgtgatgcgcgcggcgaaagtgcaggtgtcggatctgctgaagatcgatacgccgatcgtgcggctgaacggcaacgatctcgtgctcaacgtcgacaagctgctgccgccgccccatctgaagatcaatatcgtctcgctgaaactgacttccgccggcctcgatctcgtgctcgacgacggcacgaaggcgggcttcacgatgccggagaacgcgccgaagcatgcaatgtatctgcgcggcggcgacgtgaaattcatgcgcacgatgccgatgaacgcggacatcgtgatctacccgccgcgcgaatcgtcgcccgacgacgcattcgtattcgacatgtatcactatcgcgatcagctcgtcgccggctatttcaacttcgagccgagcggcgcgctgtcgattctgatgccgtcgtatcggcggctcgcgcgcccgagcgcgccgagcctcggcagcgcggccgcgcggatgaacgacagcctgatcgacgcgcagcagttaagcctcggcgaagcgcgccgccaatgggaggcgttcgcggtcacgccgaacggcggcgcggcgcagccgaacttccgcaaggtggccgccaagcacggcggcgatgtatcgatgttcggcccgcgccatatttcgaacggcacgacgacgatccacctgcacaacgcggacttctacattgcgggcaatatcggctttcgcgtcgaggatctcgtcgtccagctcgtgtcgaagcgcgcgggcgagcccgtcgatctcgacgatccgaaccagtacgacatccgcattctgagcggctcggtgctcgcgccgtgggatgcgatgtccgacctcttcaaccgccacctgctcgactattcgccgcgctcgctgaacgacctgaagctgagcgccgacggcggcgcgctgcgcgtgcggggcggcatcaagctgtggaatcaggtgccgcccggcgtctggctgccggccgacatgaagggttcgctcacactgctggacgaacgccatctcgcgttcacgccgacgcaggtatcggtgctcggcataccgcaggcgaagctgctgcgcgcactcggcatcgagctgtcgtcgctcgcgccgctcaagcgccgcggcgccgagctgcgcggcgattcgctcgtgctcgaccagtacaccgtgttcccgccgcccgtgctgatcggccacatgtcgcaggcgacagtcgagccggacggtctgcgcctcacgttccgccccgcgccgaacgcaccggtgctgcggccgccggcgaaccttcccggcagctacctgtggctcgaaggcggcgacacgaagatgttcaacgtcctcgtgctgaacatgcgcattctcgtcgaggacacggccaagccacgggtgcgcttcgatctctacgattaccgtgacgtggtctcgcgcggctcggtgcggatggtgcacgatgggacgctgtacgtcgacgtcggcaagaaggatccgctcgcccgatga

SEQ ID NO: 977 - DNA, 561 bp, Burkholderia pseudomallei
atgaaggctcactggaaagtctgggcggctctcgcttgcgtgtccgcctgcgcgggcgtgcaggcgcagaccagcccgctcacggggacggtcaactcgcagctcgtgctgacgacgggctgcgcggtcgatacgggcggcggctcggtgaactcggcgaacttcggcacgctcgacttcggcacgcagccgagcggcttcacgggccggctcacgagcgcggcgaagggcggcggctcgacgtcgacgcaagtgacctgctcgcctgacgtcacgtcgatccaggtgacgatcgacggcggccagaacgcgtcgaagggtgcgaccgtcggcacgggcacgcgcgcgctcgcgaacggcgcgagcttcgtgccgtacgaagtctacgcggatgcggggcattcgcaacagtacgtgtcgggcacggcgcaatcggtcgcggtgccgacacccggcgccgcattcgagctgccgttgtacggcgtcgtcaacaagacgaacgcgtcggcgctcgctgccggcacctataccgacgtgctgaacgtcacgctcggctggtaa

SEQ ID NO: 978 - DNA, 549 bp, Burkholderia pseudomallei
atgaagaccgtgggcgataaactcgaagctttcaccgttgtggccgcgaagccgggcttcaacaatcacgaagaaaacggccagtcggcattcgagaccgtcaccgaagcgtcgttcccgggcaagtggaagatcatctacttctacccgaaggacttcacgttcgtctgcccgacggaaatcgtcgaattcgcgaagctcgcgaagcagttcgaagagcgtgacgccgtcctgctcggcggcagctcggacaacgaattcgtcaagctcgcatggcgccgtgagcacaaggatctcgacaagctgaaccactactcgttcggcgacgtcaagggcgagctgatcgaccagctcggcgtgcgcgacaaggaagcgggcgtcgcactgcgcgcgaccttcatcgtcgatccggacaacacgatccagcacgtgtcggtgaacaacctgaacgtcggccgcagcccggaagaaatcctgcgcattctcgacggcctgcaaacggacgaactctgcccgtgcaaccgcgcgatcggcggcgcgacgctgtaa

SEQ ID NO: 979 - DNA, 597 bp, Burkholderia pseudomallei
atgcaaaaacgattcaagcaactggtcctgctggcggcgatggttccggcattcgcgatggcgcaatcgctgtcgaaccagacttcggctccggcggccgctgctccgatcgacgcggacaagaaggcggcgatcaaggatctgctcgacgcaatcgacgcgccgaagctcgtgtcggcgatcgcgaacagcgccgagatgcaatcgaagcaactcgtgccggcgatcctctcggacgcgctgtcggagaacaagacgctgaacgacaagcagaagcaggccgccgtgccgacgctgcagaagaacgcggtgccgaagctggtcgacggcgcgggcaaggtgttcggcacgcagcagttcacgaacgacgcgatgcaggctcagtacgacgcgtacgcgaagtactacagcacgtcggagatcaaggatctgacgacgttctacaagagcccgacgggccgcaagttcatccaggtccaggaccaggtcggccgcgacgtcgtgaacggcctgatgcagaagtacatgccgcaggcgatcaaggcgacgcgcgaccaggccgacaaggaagtcgcggcggtcaagccgggcaagtaa

SEQ ID NO: 980 - DNA, 675 bp, Burkholderia pseudomallei
atgaataaactttcaaagctcgcgttcattgcagctaccgcagttatggctgcatccgcttcggcacagtcggtgccggcgtcgcgacaagccgtgaatgacaactgggtgaatggcacgggcgaatgggtgtggatgaacggcacgaacgagctctgctggcgcgatgcgttctggacgccggccaccgccaacgccaagtgcgatggcgcactggtcgcccaggcaccggcaccggcgccggtcgcaccggttgctccggccatcacgagccagaagattacgtaccaagccgatacgctgttcgacttcgacaaggccgtcctgaagccggccggcaagcagaagcttgacgaactggccgcgaagatccagggcatgaacgtcgaagtggtcgtggccacgggctacacggaccgcatcggttcggacaagtacaacgaccgtctgtcgctgcgccgcgcgcaagccgtcaagtcgtacctcgtcagcaagggtgtcccggcgaacaaggtctacacggaaggcaagggcaagcgcaacccggtcacgggcaacacctgcaagcagaagaaccgcaagcagctcatcgcctgcctcgcaccggaccgccgcgtggaagtcgaagtggtcggcacgcaggaagtgcagaagacgaccgttccggcgcagtaa

SEQ ID NO: 981 - DNA, 1641 bp, Burkholderia pseudomallei
atggcagctaaagacgtcgtattcggcgattccgcacgcgcgaagatggtcgaaggcgtgaacattctcgccaacgctgtgaaggtcacgctgggtccgaagggccgcaacgtggtgctcgagcgcagcttcggcggcccgacggtcacgaaggacggtgtgtcggtcgcgaaggaaatcgagctgaaggacaagctccagaacatgggcgcgcagatggtcaaggaagtcgcttccaagaccagcgacaacgccggcgacggcacgacgacggccaccgtcctcgcgcaatcgatcgtccgcgaaggcatgaagtacgtcgcatcgggcatgaacccgatggacctgaagcgcggcatcgacaaggcagtcgccgcggcagtcgaagagctgaagaagatcagcaagccgtgcacgacgaacaaggaaatcgcgcaagtcggcgcgatctcggcgaacagcgattcgtcgatcggcgatcgcatcgctgaagcgatggacaaggtcggcaaggaaggcgtgatcaccgtcgaagacggcaagtcgctcgccgacgagctcgacgtcgtcgaaggcatgcagttcgaccgcggctacctgtcgccgtacttcatcaacaacccggacaagcaagtcgccgtcctcgagaacccgttcgtgctgctgcacgacaagaaggtgtcgaacatccgcgacctgttgccggtgctcgagcaagtcgcgaaggctggccgtccgctgctgatcatcgccgaagacgtcgaaggcgaagcgctcgcaacgctggtcgtcaacaacatccgcggcatcctgaagaccgttgcggtcaaggcgccgggcttcggcgatcgtcgcaaggcgatgctggaagacatcgcgatcctgacgggcggccaggtcatcgcggaagaaaccggcctcacgctcgagaaggcaacgctggcagaactgggccaggcgaagcgcatcgaagtgggcaaggaaaacacgacgatcatcgacggcgcgggcgaagccgtgaacatcgaagcgcgcgtcaagcaaatccgcacgcaaatcgaagaagcgacatcggactacgaccgtgaaaagctgcaagagcgcgtggccaagctggcaggcggcgtggcggtgatcaaggttggcgctgcgaccgaagtcgaaatgaaggaaaagaaggcacgtgtcgaggacgcgctgcacgccacccgcgctgccgttgaagaaggcatcgtcccgggcggcggcgtcgcgctgatccgcgcacgcaccgcgatcgcgggcctgaccggcgtgaacgccgaccagaacgccggcatcaagatcgtgctgcgcgcgatggaagagccgctgcgccagatcgtcacgaacggcggcgaagaagcgagcgtcgtggtggcggcagttgctgcgggcaagggcaactacggctacaacgcggcgacgggcgagtacgtcgacatggtcgaagccggcgtcgtcgatccgacgaaggtcacccgtaccgcgctgcagaacgcggcttcggtcgccggcctgctgctgacgacggacgcagccgttgccgaactgccgaaggaagacgctccgatgccgggcggcatgccgggcggcatgggcggcatgggcatggacatgtaa

SEQ ID NO: 982 - DNA, 294 bp, Burkholderia pseudomallei
atgaaccttcgtccgttgcacgatcgcgtgatcgtcaagcgcctggatcaggaaaccaagaccgcctcgggcatcgtcattcccgacgcagccgctgagaagccggatcaaggcgaagtcctggccatcggcccgggcaagcgcgatgacaagggcgctccgatcgcactcgacgtgaaggtcggcgatcgtgttctgttcggcaagtacgctggccaaaccgtcaaggtcgacggccaggaactgctcgtgatgcgcgaagaagacatcatggccgtggtcaacgctaagtaa

SEQ ID NO: 983 - DNA, 513 bp, Burkholderia pseudomallei
atgatgtcgaagaaacttcgtctggcgttcgcgatgctgatgatcggcgcgctcgcggcatgcaagtcgggcgtgaagctcgacgagcacgcgaaccagggcgacgcggtcagcacgcaaccgaatcccgaaaacgtcgcgcaggtgaccgtcgatccgctgaacgatccgaacagcccgctcgcgaagcgcagcgtgtacttcgatttcgacagctactcggtgcaggaccaataccaggcgctgctgcagcaacacgcgcaatacctgaagagccatccgcaacgccacatcctgatccagggcaacaccgacgagcgcggcacgagcgagtacaacctcgcgctcggccaaaagcgtgcggaagccgtgcgccgcgcgctgtcgctgctcggcgtcggggatgcgcagatggaagccgtgagtctcggcaaggaaaagccggttgcgctcggccacgacgaagcgtcgtgggcgcagaaccgccgtgcggacctcgtctatcaacagtaa

SEQ ID NO: 984 - DNA, 318 bp, Burkholderia pseudomallei
atgcatgttcgtcccctctacgaccgggttatcgtcaagcgaatcgaacagcagcggacgacggcctcgggcatcgtgattcccgactcggccgccgaaaaacccgaacagggcgaaatcgtcgcgcttggcaacggccggctgctgcaggatggaacgcttcgcgcgctccagctcgaagtcggcgaccaggtcattttcggcgagtacgccggccagagcatcaaggtcgacggcgaggacttcctcgtcatacgcgaggaggacgtgctgggcgtgctcgaagccggcgagcgcgccgcgcgcaaggccgcctga

SEQ ID NO: 985 - DNA, 660 bp, Burkholderia pseudomallei
atgagccttggactcgtaggtcgcaaggttggcatgacccgtatcttcacggcggaaggggattcgattcccgtcaccgtgctcgacgtgtcggacaaccgcgtgacgcagatcaagactgttgaaaccgacggctacacggccgtgcaggttgcattcggctcccgccgcgcgtcgcgcgtgacgaagccgctggcaggtcatctcgccaaagccggtgtcgaagccggtgaaatcctcaaggaattccgcatcgaagccgacaaggccgccgagctgtcgaacggcgccgtgatcggtccggatctgttcgaagtgggccagaaggtcgacgtgcaaggcgtgtcgatcggtaagggctacgcgggcacgatcaagcgctacaacttcggctccggccgcgcatcgcacggtaactcgcgctcgcacaacgtgccgggctcgatcggtatggcgcaggatccgggtcgcgtgtttccgggcaagcgcatgacgggtcacatgggtgacgagacggtgacggttcagaacctggaaatcgctcgcatcgacgccgatcgcaagctgctgctcgtcaagggtgcagttccgggtgcgaagggcggcaaggttttcgtgacgccggccgtgaagacgcgtgccgtgaagggggcgaaataa

SEQ ID NO: 986 - DNA, 1404 bp, Burkholderia pseudomallei
atgtcggacgccttttcgaaaggggtggcaatggccatagccgtcgcccctttgtttgccgcttgtagtggagggggcggcggcaccccggcccccatcgccgtgccgcaatgctccggttcgagctgcggcgttcagggtccgcccagctcgacggcggccaacacttcgctgtgccccgccgacgcgaacatcggcagcagcacctatctcggcggcgccggcggcggcgagatcgtgagcctgaacatcaacgcgaccacgatgacgtacacgctcaagtggctcgagtcgccggttccgctcgccaccggcaccgtcacgccgacccgcgccggcacgacgatcacgggcagcgtcgcgcatccgcccgcgggcacgctgccgaccgccgagcagacgcgctgcgcgttcgtgctgctgcccggcagcggcacggcgcccgcgacgaattcgacgtactcgaccgcggccgacttcaaccaggcgaacccgccgatgatcctgatcggcttcgacgtcgcgggcggcggcattccgggcgcgacgatccagtacagcggcctcacgatcatcccgggcgtgctgcagaacatcggccaggtgccgcagcgccatttcgacttctatccgttcctcggcttcgcgaacacgacgaccgatctgtcgaagctgccgggcacgtacaacgccctcgtctatcacacggtgccgtcgggcaactacgcggcgaaggcgatcgcgtcgaacgagacgttcgatgcgaacggcgcgtgcacatcgacgagcgcatcgggctgcatgacgaccggcaatccgtggacggcgagcggcaacggctacttcaacagcacgcaggcgccgcagatcctgccgcagacgcagttgccgctcatcggcgcgaccggcaaatcggccgtcgcgcacatggtgctcggccagttgaacggcgcgaccgtgcctgtcgtcgtgcgcacgggcaacgtgaatctcggcacgccgccgctgcacaccgatgcgcaggtggacgacgaatcgggcatcgcggtgctcgggctcgcgcaggcgatcgcgtcgggcggcatcgacggcggctacgcgggcgcggactcgaacttcaagtacacggcgacggtgatcaagggcacgacgggcacgttcgtgaacccgagcacgcagcaggccgagacgggcttcacgctcgactacggccagtcgacgccggggctgctcggcgtcacgacgaccgacacgtcggcgccgggcttcgtgatcgcgagcggcgggctatatgcggcgctggtccagggcaccgtcaacggcggcatcacgcagagctcggcgatcgccggccagacgccgtccgcgccctacttcggcgtaggcgcgcaagtcagcaagtaa

SEQ ID NO: 987 - DNA, 1167 bp, Burkholderia pseudomallei
atgctcggaatcaacagcaacattaactcgttggtcgctcaacagaacctcaacggctcgcaaggcgccctgtcccaagcgatcacccgcctgtcgtcgggcaagcgcatcaacagcgcggcggacgatgcggccggcctcgcgatcgccacccggatgcaaacgcagatcaacggcctgaaccagggcgtgtcgaacgcgaacgacggcgtgtcgatcctgcaaacggcatcgagcggcctgacctcgctcaccaacagcctgcagcgtatccgccagctcgccgtgcaggcctcgaacggcccgctgagcgcgagcgacgcgtcggcgctgcaacaggaagtcgcgcagcagatctcggaagtgaaccgtatcgcttcgcagacgaactacaacggcaagaacatcctcgacggctcggcaggcacgctgagcttccaggtcggcgcgaacgtcggccagacggtctccgtcgacctcacgcaaagcatgtcggcggcgaagatcggcggcggcatggttcagacgggccagacgctcggcacgatcaaggtggcgatcgactcgagcggcgcggcctggtcgtcgggcagcaccggccaggagacgacgcagatcaacgtcgtgtcggacggcaagggcggcttcacgttcaccgatcagaacaaccaggcgctgtcgtcgacggccgtgaccgccgtgttcggctcgtcgaccgccggcacgggcacggcggcctcgccgtcgttccagacgctggcgctgtcgacttcggcaaccagcgcgctgtccgcgaccgaccaggcgaacgccacggcgatggttgcgcagatcaacgcggtcaacaagccgcaaacggtctcgaacctcgacatcagcacgcagacgggcgcgtaccaggcgatggtatcgatcgacaacgcactcgcgacggtcaacaatctgcaggcaacgctcggcgcggcgcaaaaccgcttcaccgcgatcgcgacgacgcagcaagccggctcgaacaacctcgcgcaggcgcaatcgcaaatccagagcgcggactttgctcaggaaaccgcgaacctgtcgcgcgcgcaagtgctccagcaagccggcatctcggtgctcgcgcaagcgaactcgctgccgcagcaagtgctgaagctcctgcaataa

SEQ ID NO: 988 - DNA, 1542 bp, Burkholderia pseudomallei
atgcaactcaatccctctgagatcagcgagctgatcaagagccggatccagggccttgaagcgagcgcagacgttcgcaaccagggcaccgtgatctccgtgaccgacggcatcgtgcgcattcacggcctgtcggacgtgatgcagggcgaaatgctcgagttcccgggcaacacgttcggcctcgcgctgaacctcgagcgcgactcggtcggcgcggtgattctcggcgaatacgaacacatctcggaaggcgacatcgtcaagacgacgggccgcattctcgaagtgccggtcggcccggaactcgtcggccgcgtggtcgacgcgctcggcaatccgatcgacggcaagggcccggtcaacgcgaagctgaccgacgcgatcgagaagatcgccccgggcgtgatctggcgcaagtcggtgtcgcagccggtgcagacgggcctgaagtcgatcgactcgatggtgccgatcggccggggccagcgcgagctgatcatcggcgaccgtcagtgcggcaagaccgcggtggcgatcgacacgatcatcaaccagaagggcaaggacctcatctgtatctacgtcgcgatcggccagaaggcttcgtcgatcatgaacgtggtgcgcaagctcgaggaaaccggcgcgctcgaatacacgatcgtcgtcgccgcgtcggcgtcggaatcggccgcgatgcagtacctcgcgccgtacgccggctgcacgatgggcgaatacttccgcgatcgcggccaggacgccctcatcatttacgacgacttgaccaagcaagcttgggcgtatcgtcagatctcgctgctgctgcgccgcccgccgggccgtgaagcgtacccgggcgacgtgttctatctgcactcgcgactgcttgagcgtgcggctcgcgtgtcggaagagtacgtcgagaaattcacgaacggcgaagtgaagggcaagagcggctcgctgacggcgctgcccgtcatcgaaacgcaggcaggcgacgtgaccgcgttcgttccgacgaacgtgatctcgatcaccgacggccagatcttcctggaaaccgatctgttcaacgccggtatccgccccgcgatcaacgcgggcgtatcggtgtcgcgagtcggcggcgccgcgcagacgaaggtcgtgaagaagctgtcgggcggtatccgtaccgacctcgcgcagtatcgcgaactggccgcgttcgcgcagttcgcgtcggatctcgacgaagcgacccgcaagcagctcgagcgcggccgccgtgtgacggagttgctcaagcagccgcaataccagccgctgcaggtgtgggagctggccgtgtcgctgttctcggcgaacaacggctatctcgacgacctcgacgtcaaggacgtcctgccgttcgagaagggcctgcgcgagtatctgaagacgagccacgctgacctcatcaagcgcatcgaagacacgaaggacttgtcgaaggacgacgagagcgcgctgcacgccgcgctcaaggacttcaagaagtccggtgcctattga

SEQ ID NO: 989 - DNA, 1938 bp, Burkholderia pseudomallei
gtgacgccgcgagcggcacttgtcacgcttcttctcgcggcatggtctgcgccgagcgttgcgcaagcactccaccctggatcgggggcgcagagtgttgaagtgggggcgggatcgaacgcatcgggttcgcaaagcaccgcactgggtaacggtgcgcaggcgacgggcagtcatagcacggcaacgggccaaggctcgcatgcgacgggtagtaacagcacggcaacgggtcaggatgctaacgcgtcgggcacatcgagcacggcgacgggccaaggttcgcaagcgacggggaacaacagcacggcaacgggtcaggatgccaccgcgtcgggcacatcaagcacggcgacgggccaaggttcgcaagcgacgggtagcaacagcacggcaacggggcaggatgccaccgcgtcgggtgaatcgagcacggcaacgggccaaggttcgcaagcgacggggaacaacagcacggcaacggggcaggatgccaccgcgtcgggcacatcaagcacggcgacgggccaaggttcgcaagcgacgggcagcaacagcacggcaacggggcaggatgccaccgcgtcgggtgaatcgagcacggcgatgggccaaggctcgcaagcgacggggaacaacagcacggcaacggggcaggatgccaccgcgtcgggtgaatcgagcacggcgatgggccaaggctcgcaagcgacgggcagcaacagcacggcaacggggcaggatgccaccgcgtcgggtgaatcgagcacggcggcgggccaaggctcgcaagcgacgggcagcaacagcacggcaacgggtcaggatgctatcgcgtcgggtgaatcgagcacggcgacgggccaaggttcgcaagcgacgggtagcaacagcacggcaacggggcaggatgctaccgcgtcgggtgaatcgagcacggcgacgggccaaggttcgcaagcgacggggaacaacagcacggcaacgggtcaggatgccaccgcgtcgggcacatcaagcacggcgacgggccaaggttcgcaagcgacgggtagcaacagcacggcaacggggcaggatgccaccgcgtcgggtgaatcgagcacggcgatgggccaaggctcgcaagcgacgggcagcaacagcacggcaacggggcaggatgctaacgcgtcgggtgaatcgagcacggcgacaggccaaggtgcgcaagcgacgggggacaacagcacggcaacgggccaggatgccgccgcgtcgggtgaatcgagcacggcgacgggccaaggctcgcaagcggcgggcagcaacagcacggcgaacggcgccggtgccgccgcgaccggacaccagagcactgctctgggcgcgggcgctcaagccgctggctcacagggcgtcgcgagcggctggaacgcaaacgcgtcggggactcaaggcgtcgcaatcggcggcaatgcctcggcgcagggcaatcaaagcatcgcgctcggagccaatgcgtcggcgacgggcgaccacagcatcgcgttgggcgccggctcgcaggcaacgggctcgaactcggtcgcgctgggccaggggtcgatcgcggaccgcgacaactcggtttcggtgggttcggatggcggtgagcgcaacgtcaccaatgtggcgaatggatggcacgataccgacgccgtcaatttccggcaactgcgcgaggtcgcgcgctacgcatacagcggcatcgctgccgcaactgcgctggccatgattccggacgtcgacgcaggcaagacgttttcgatcggcgtcgggacgggcggctacctcggctatcaggctgtcgccgtcggcgcgtcggctcgccttggacaaaatctgaaggtccgggtgggcgcgggcattagcgcggcgtcgacgacatggggcgctggcgcatcgtatagctggtag

SEQ ID NO: 990 - DNA, 546 bp, Burkholderia pseudomallei
gtgaaaaagaaggtcgtaagtttcgccgttgcgacattgtttggccttgttgcagcgcagagcgtgtatgcacagtcgatcgatcaggggcaggtcaaattcacgggtgagctgaccgccaacacgtgcacgatcgacgccggcagcaaagaccaaatcgttcccttgccgaaagtttccacgagcgctctggcggcgccgggagatgtcgctggttcgacggcctttgaaatcaaggtgtcgaagtgcgctgcggatgtcaagaaggtcgccgctcacttcgagatggaaaacatggaccccaacacgcgtacgttgaaaaacgaggccacgggaacggacgccgcgacgaacgtgacgattcaactggtcaactccgatggcaccgaactgccggtaggttcgaccggtagttacttcgacgtcaccggaaccgacgatgcgcgtggggcaaccatgatctatggcggccagtactacgcgttggatacaaccaccgcgggtaaggtcgagtcgcacacgctcttcacgcttgcctacgaataa

SEQ ID NO: 991 - DNA, 1029 bp, Burkholderia pseudomallei
atgaagaaaaaattctcaagattccttgcggccctcgtcttgctcgcagcgaccgtcgatgcgcttgccgccggctgcaacatgctgaccgcggagaatatcgcgtggctgaccgagcaaggcaagatcgcgcgcgctcacagttcctttcccatatccttctcttccggaatggtcgatgtcgacccgaacctcgagatcggaggcttgatagcagaggcaaaaagcatcccaagcgaagaactgcacttcatttggtgcagcgcgccctccgggaatgttcactttgcgctcaattcgtccccgctgccgtcggaactcggaaattcgatctatgaaaccggtgtgcccggcgtcggattccgaatcactcaggttcgccagagcggctcgataggggcgattcctcgcgatacgccgtggatcgaagaaaagcccggccaggacagctctctgaatttcggcgcgggaaccgtgttccgtatcgagctgatcaagaccagcgaagcgttgccgagcgaatcgaccatatcccttggcaacctcagtcgcgtatacggtgacgacaacaaaacggtcgtcgatttcaatgccggcagcgtcaagttgcgcgtgctgccgatctgccatgtcgatcaacaggaaaaaaatgtagatttcggccaattcggcccgaaagacgtttccttcgattccggccccaccaaggacgtcaagtttgacgtccagtgttcgggcccgacgccccccgtctccatcacggcgactttggccgcgacgccggatagtcacgatcaaagcctgatcgcgaacgccggcgatgccatgaaccttgccatccgattgcgcgatgcaagtacgcaacaggttctcaggcccaacgatcccaccagcgaaatcaaggtcgagcccggcggcgcaatggagcacggattcgcactggaggcgactgtcctgcgtgtcggcacggcgccgcccacggcgggcacgatcgacgcaacctcaatcatcacgctaaccattttgtga

SEQ ID NO: 992 - DNA, 1176 bp, Burkholderia pseudomallei
gtgaaacgcctgtttctgattctgatcctcgtgccgacgatgttcctcgcggccggctgcgataacgtcccggccggctacgtcggtgtgaaggtgcaacgctacggcgacgaccgcggcgtcaacgtcgaagtgaaggggcccggtcgctacttcaacgggcccaacgtcgacatgttcatcttcccgacgttcacgcagtcctacgtgtgggacaaagctggcaagtccgacgagtcgttcacgttccagacggtggagggcctgtcggtcaacaccgacatcggcgtcagctacgcgatcccgcgtgagaacgcgcccaaggtgttccagaagtatcggcgcggagtagatgagatcacgggcgtctacctgcgcgcgatcgtgcgcgacgccctgaatctcgccggcgcgtcgatggcggtcgaggacgtctacggcaggggcaaggcggcgctacagcagcgcgtcgaggacgaggtaaaggcgaacgccgcgaaggtcggaatcagtgtcgagaaggtctatttcgtgaatcagatgcgcctccccgagcaggtcatgaactcgatcaacgggaagatcgctgcgacgcagatcgcgcagcagaaggagaacgaactgcgtgcagccgaggcggacgcggcaaagcaagtcgcgatcgccaagggcgaggccgaagcgctcgaggtgaaagcgaaagcactacgcgagaacagccagatcctgcaacagatggcgatcgagaaatgggacggcaagctcccccagtacgcgcgccgcgcggtgggctgggcgtttagtcagcacgcggacaccgacttggcactaaaggcattaagacgggcttacgatcatcgtcgtccgccaccaggcctgatgttccattcggatcagggctgccaatacacgagcacgcgctttctcgccgagctgcgcgcccgtggcacgatccagagcatgagtcggcgcggcaactgttgggacaacgcggtggtcgagcgcttcttccgaagcctcaaaaatgaatggatcggcgaccagttgtacgtcgatcaccgccatgcagagcaagacatcactgattatctagtcgatttttacaaccatcgtcgccttcactcggctgcgaagggacttcgacagacgtatcgatttggtgttcaaggccagtga

SEQ ID NO: 993 - DNA, 291 bp, Burkholderia pseudomallei
atgagcctacgcccgctacacgatcgcgtcatcgtcaagcgactcgatcaggaaaccaagaccgcctcgggcatcgtgattcccgacagcgcggcggaaaagcccgatcagggcgagatcgtcgcggtcggccccggccggcgcgacgccgacggcaagcgcgtcgagcccgacgtgaaggtcggcgagcgcgtgctgttcggcaagtatgccgggcagtccgtgaaggtcgacggcaacgaactgctggtgctgcgcgaagaggacatcgtcgcagtcgtacattcctga

SEQ ID NO: 994 - DNA, 1641 bp, Burkholderia pseudomallei
atggcagcgaaagagatcattttccacgacggcgcgcgcgcgaagctcgtcgaaggcgtcaatctgctcgcgaacgcggtgaaggtcacgctcgggccgaagggccgcaacgtcgtgctcgagcgcagcttcggctcgcccgtcgtcacgaaggacggcgtgtcggtcgcgaaggaaatcgagctggcggacaaagtgcagaacatcggcgcgcagctcgtgaaggaggttgcgtcgaagacgagcgacgcggcgggcgacggcacgacgaccgcgaccgtgctcgcgcaggcgatcgtgcgcgaagggcagaagtacgtcgccgcgggcctgaatccgctcgatctgaagcgcggcatcgacaaggcggtggccgccgccgtcgacgagctgaagaagatcagcaagcccacgacgacgagcaaggagatcgcgcaggtcgcgacgatctcggcgaacggcgaggaatcgattggccagcgcatcgccgaggcgatcgaccgcgtcggcaaggaaggcgtgatcaccgtcgaggacggcaagtcgctcgccgacgagctcgacgtcgtcgaagggctgcagttcgatcgcggctacctgtcgccgtacttcatcaaccatcccgagcgccagctcgcggtgctcgacgagccgttcatcctgctgcacgacaagaagatctcgaacatccgcgatctgctgccggtgctcgagcaggtcgcgaaggcgggccggccgctgctgatcgtcgccgaggacgtcgagggcgaggcgctcgcgacgctcgtcgtcaacaacatccgcggcatcctgaagaccgtcgcggtcaaggcgccgggcttcggcgaccgccgcaaggcgctgctcgaggacatcgcgatcctcacgggcggccaggtgatcaccgaggaaaccggcctcacgctcgagaaggcgacgctgcaggagctcggccgcgcgaagcgcatcgaggtcggcaaggagaacacgacgctcatcgacggcgcgggcgacaagccgaacatcgatgcacgcgtgaagcagatccgcgcgcagatcgccgaggcgacgtccgactacgatcgcgagaagctgcaggagcgcgtggcgaagctcgccggcggcgtggcggtgatcaaggtcggcggcgcgaccgaagtcgaggtgaaggagaagaaggaccgcgtcgacgacgcgctgcacgcgacgcgcgcggccgtcgaggaaggcatcgtgccgggcggcggcgtcgcgctgattcgcgtgaagcaggcgatcgcggcgctcgcgggcgcgaacgccgaccagaaggcgggcatcagcatcgtgctgcgcgcgctcgaggagccgttgcgccagatcgtcgcgaacgcgggcgaggaggcgagcgtcgtcgtcgcgacggtcgcggcgggccagggcaactacggctataacgcggcgacgggcgaatacggcgacctcgtcgaatcgggcgtgctcgatccgacgaaggtcacgcgcaccgcgctgcagaacgccgcgtcgatcgccggcctgctgctcacgacggatgcgacggtgcacgaggcgccgaaggatgcgccgcccgccgcgccggcgggcgtgccgggcgcgggcggcccgggcttcgatttctga

SEQ ID NO: 995 - DNA, 1362 bp, Burkholderia pseudomallei
atgagtagtctgccggtaggaccggtcgcgtggagcgacggcatgctgatcgagacgcagcacttccagcagctcgagcggcatctcgcgcatcaggcctcgctgcggctcggtcagacgtcgaatcacggctggggcttcacgctgctcgatctcgaccaggacggcctggggctcggccggctcgggctgcgccacgcgcgcggcgtgttccaggacggcaccgcgttctcgctgccgtcggacgatccgctgccgccgccgctggaaaccgagctcgcgcaggcgggcgacatcgcgtgcctcgcgctgcaggccgcgcgcacgggcggcccggagatggcgttcggcgacgtcgagctggcgtcgcgctatcgcgcggtgtcgaccgaggtgccggatctcgcggtcgggctcgacgcgcccggcacgccgcggcgcctgacgatcgagacgggccagctcgtcacgcgcctgtgctggaagtcgcagctgcgctcggacgaggtcgcgctgccgatcgcgcgcgtggcggggcgcaacgcgagccgcacggtgtcgctggatccgcgcttcattccgccgctgctcgacacgcgcgcgcacctggtgctgcgctcgctgatcgacgagctgcagagcacgctgcgcgtgcggctcgcgagcacgtccgcgcagcgcgtgctgtcgacgggcgggggcgtggccgatctgatcgagctgctgctgcgccaggcgatcgccgagtaccggatgcgcttggcgaacctcgacgcgttcgatccgctgccgccggcgatgctgtatcacgagctggtcggcctgctcgggcggctgagcgtgctgccgggcgtcgacgaggaactggccgaccgcgagctcggctacgaccacgacgatctgcagacgagcttcgagccgctcgcgatgatgctgcgccaggcgctcgcgcgcgtgatcgagacgccggtgctgccgctgcgcttcgaggatcgcggcgatcaggtgcacatctgcatcgtcgacaagcagtggaacctgaagaaactgatttttgcgttttcggccgcgatgccggcggagaagctgcggcaactgttgccgcagcagacgaagctgggcgccgtcgagcagatccagaagctcgtggacctgcaactgccgggcgcgcggctgaacgcgctgcccaatcccccgcgccagattccctactacgcccaaagcacgtacttcgaagtggaatcgaccgatccgttctggaagcagaccctcgccggctcggcgatggcgctgcgcatcgtcggcgatttccccgatcttcgcttcgaagcctgggggctgagagacggcaaggtggcgtga

SEQ ID NO: 996 - DNA, 1860 bp, Burkholderia pseudomallei
atgcatagcccaccgtttctttcatcgcccaagcgcgcgctgccgatcgcgctcgcgctcagcctcgccggttgctcgatggagccggcctaccagcggcccgatgcgccgatgccgtccgcgtatccgaacggccccgcctacgcgacgccgggcgcgccgcgcgcgaacccgggcgagccggcggcggccgagctcggctggcggaatttcctcgccgacgcgcagttgcagcagctcgtcgcgctcgcgctcgcgaacaaccgcgacctgcgcgtcgcgacgctcgacatcgacgaagcgcgcgcgctgtaccgcatccagcgcgccgcgcagtttcccgcaatcgatgcgagcgtcggactcacgagccagcgcatgagccccgcgctgcgcgcgccggggcagtccgcggcgatcaacagctatgacgcgagcgtcggcctcacccatttcgagatcgacctgttcggccgcgtgcgcagcctgagccacgccgcgcaggagcaatacctcgcgaccgaggaggcgcggcgcagcgtccacatcagcctcgtcgccgaagtcgcgaacacctacctcacgctgctcgccgatcgcgcgctgctcgcgctcgcgcaggacacgctcaggagccagcaggacgccgccgacatgatccaccgcggcaagcaggcgggcgcgatggcgcagctcgacgagcatcgcgcggacacgcaggtgcagaccgcacgcgtcgccgccgagcaatacacgcggcagatcgcgcaggacgagaacgcgcttgccgtgctgatcggcgggccgctgccggccggcgtgtcgcgcgcggcgccgctcgacgatcgcgcgctgctcgcggagttcccggcgggcctgccgtcgacgctgctcgagcgccgccccgacatcatggccgccgagcatcggctcatcgccgcgaacgcgaatatcggcgcggcgcgcgcggcgttcttcccgaggatcacgttgacgggcgcgctcggcgtggcgagcgcgagcctcgcggggctgttctccggcggcgtcgcgtggctgttcgtgccgcagctcacgctgccgatcttcaacgcgggcagcaatcaggcgaatctcgatctcgcgacggtgcgccgcgacatcaacgtggccggctacgagcacacgatccaggacgcgttccgcgaggtcgccgacaacctggccgcacgcgcgacctacgagcgggaagtgaaagcgcaggaggcgatgatccgcgacctggccgagacgaagcggctggccgacatgcgttttcgcaacggcgtcgacgactacttcggcgtgttcgatgcgcaacgccagctgttcgccgcgcagcaactgctcgtcacctacaagcttgccgggctgacgagccgcgtgacgctatacaaggcgctcggcggcggctgggtcgaatcggcgggcgcggcggccgcgcaaccgcggacggggcaggccgcgccgatggctcgaccggcagccactccaccccagacgacgcgacccgcgccggttgctcgatcgcagacggttccaccgcgaacggttcagcccccgatcgcccaaccggcaaccgcgcaaccgcaaacggcgcaagccgcgccggttgctcagtcgcagacgattccactgcgaacggtccagccgcctatcgcccaatcgtcaacctctcaaccgcaaacggcgcaagccgcgccgatcactcaagcgcggacgacaccactccgaacggctcagccgcccgccgctcgacaacaggcgccgcaatccgctccggcggctcaaccggaggcagctccaccgcaaacggcccaaccgccgatttttcagccgtaa

SEQ ID NO: 997 - DNA, 1647 bp, Burkholderia pseudomallei
atgcaacgctgtctcgcccaccccgcccgcctcctcgctgcgacgctgctgtgcgtcgcgctcgccgcctgcggcgccgacgacacgaacgacagcgccgcgccgccgctcgcccggccgaacccgacgcccgacgcccccgcgccgacacccgccgccgcgcccacctactaccagacgaaaacgccttatcggccgcagcaggatgcttcgcgctacgaagcaccgcccgcgggctacgcgcccgtctataccgaaatgctcgcgcgccacggctcgcgcgggctgtccggcttcaagtacgacggcgcgatctacgacatgctgcaaaaggcggacgccgaaggcgcgctcacgccgctcggccggcaactgaaggccgacacgttcgcgatgatgaaggcgaacgcgctgctcggctacggcgtcgcgggcatctcgacgcccggctacggcaatctcacgcaggcgggcattcgcgaacatcagcagctcgccgcgcggctgctgcagcggctgccggcactgttcgacacggtcgcgggcacgacgggcggcgcggcgcgcaagatcgtcgtcgtgcattccgggcaggatcgcgcggtcgacagctcagcctacttctcgggcgcgctcgtcgccgcgcgccccgcgctcgcgccggcgatcacgtcgccgagcgcgatcgccggctatccgcaaggcgcgcccgtcgcgcaggcggtgggcgccaaccgcttcctgctgtacttccatgcgctgaagccttcggtcgacctcgtcgtgtcgacagacgatccgtattacgcgacctatcgcgacagcctcgcgtaccaggcctacggcggcagcgccgccgtcaccgcgaagctcgatgcgatcatgcgggcgccgcgaacgtcgcaggtcgcgcgaacggtgctcgccgcgctcgtgacgccgggtttcgcggcgaagctcggcacggcgggctacacattctcgaacacgggcacgtacacgttcgcgtcggcggacgcgaagttcgcccatacgctcaagggcgacggcaagaccacgatcaagtccgccgccgatgccgcgaacgtgctgtacaacctgctgcaggtcgcgcccgcgatgacggccgagacgggcggcgtcacgatggagcgctacatcgccgcgccgcaggccgagtatctcgcgtatcttcaggacgccgaggatttctacgaaaaaggcccgggtatcgccgagacgaaccccatcacctaccggatggcgcaggcgctcgtcgacgatttcttcgccgagatcgacgcgatcgcgcgcggcgatctgaccaatgcggcgaagctgcgcttcacgcatgccgaagtggtgattccgttcgcatcgatcctgaagctgaaagacgtgttcgcgcccgtgccgcaagcgcagacgtacacgtacgcgaacaatccgtggcgcggcgagacggtggcgccgatggccgcgaacctgcaatgggacgtctaccgcaacggcgcgcggctcatcgtgaagatgctgtacaacgagcgcgagaccgatttccagcccgcgtgcgacggcgcgcgcatcgcgcccggcagccgcttctacgactacgcgggcctcagacgctgctacggctatagctga

SEQ ID NO: 998 - DNA, 1557 bp, Burkholderia pseudomallei
atgaatgcctttttttcccgcttctcgattcgcacccggatcttctcgacgctcgggctcgttgccgcgctgctgacgatcaccggcgtgatcggcttcttcagcatgcagaactcgaacgccgcgctcgacgacgcgtacacgcggcaactcgcggcgaagacggcgctcgcgtcggcgagcctcaatctcgcgatcacgcgcacgacgctcgaccgcgtgatcctgcatccggaggtacccgacgcggcgaacacgatcgcgaaggcggagcagtatctggccgcgtcggagcgcggctggcgcgactatgaggcgctgccgcgcggcgacgacgaaaagacgctcgcggctcaggcgaacgccgcgcgccgcgcactcgccgacgaggcgctcaagccgatgatcgacgcgctgaaggccggccggcacgacgaagccgatcgcctgatgatgacggtcgcgccgccgctgtcggtcgcgtggacgaaggcgacgaacgcgctcgacgacgcgcgcgccgcgtatggcaaggccgcgtatgacgacgccgagcaaatgtacggctggctgcggctcgtcctcggcgggctgatcgtgttcggcctggccgcgtgcctcggctgcgcgatcggcctgcacttcgcgatcacgcagccgctcgtgcgcatcctcgggcacctgcgccgcctgtcggacggcgatctgacgggcgagctgcgctggacgtcgcacgacgaaatggccgagctcgtcagcggcctcacgacgatgcagcgcagcctgtcggagaccgtgcgcaaggtgacggacggctccgaatcgatcgcgaccgcgacgcgccagatcgcggccggcaacaccgatctgtcgcagcgcaccgaggagcaggcggccgcgctgcagcagacggcggcgagcatggagcaattgaccgcgacggtgaagcagaacgcggacaacgcacgcgaggcgcagaactgcgcggacaacgcgaccgacatcgcgacgaagggcgcgacggtcgtcggcgaggtggtcggcacgatggccgagatcgaccagagctcgcagaaggtggccgacatcatcggcacgatcgaggggatcgcgttccagaccaacatcctcgcgctgaacgcggccgtcgaggcggcgcgcgcgggcgagcagggccgcggcttcgcggtggtcgcgggcgaggtgcgcacgctcgcgcagcgctccgcgtcggcggccaaggagatcaaggcgctgatcggcgaatcggtcgagcgggtcgcgacgggctcgcggctcgtcggctcggcgggcgacacgatgcaggagatccagcgcgcgatcgcgcgcgtgacgggcatcatgaccgagatctcggccgcgtcgaacgagcagcgcgacggcatcgagcaggtgaaccgcgccgtctcgcagatggatcaggtgtcgcagcagaacgcggcgctcgtcgagcaggcggcggcggccgccgcgtcgctcgaggagcaggcggacgggctgcgccgcacggtcggcgcgttccgcgtcgtcgcctga

SEQ ID NO: 999 - DNA, 987 bp, Burkholderia pseudomallei
ttgttggagcacggcgtcatgaaaatcccgggtattaacaacgtcggaaaaactggacaggccggcggagaaaccgagcgtataccatcgaccgaacctttggggtccagcgccgcgaccagtcccgccggtccacttggtgggctgccagcacgttcgtcgagcatctcgaacactaaccgaactggcgaaaatcctatgataacgccgatcatttcatcgaacctcgggttgaagcatagagttaccttgcgcaaagctacgctagccagcctaatgcagtccctgagcggggaaagcagtaaccgcgtaatgtggaacgaccgatacgacacgctgcttattgcgcgcgacccgagagaaataaaaaacgccattgagaaaagcgtcaccgactttggtgggttggaaaactataaggaacttacggggggcgcagatccatttgctctgatgacgcccgtgtgcggactttcggccaacaacatcttcaaactcatgacagagaaggacgttccgatcgatccaacgtctattgaatacctggagaatacatcattcgccgaacacgtgaatacgcttgattcgcataaaaattacgtggtaatagtcaatgacggtcgacttgggcataaattcttgatcgacttgcccgccctgacccaggggcctcgcacggcatatatcattcagtctgatctcggcggtggagcactgccggcagtcagggtagaggactggataagccgccgcggcagtgacccagtgtcgctcgacgaactaaatcagctattgtcgaaggatttttcaaaaatgcccgacgatgtgcagacgcgtttgctagcttccattctgcaaatcgacaaggatccacataaagtcgatatcaaaaaattgcacctcgatgggaaactgagattcgcatcgcacgaatacgattttcgtcaatttcaacggaatgcacaatacgtcgccggccttggctag

SEQ ID NO: 1000 - DNA, 1767 bp, Burkholderia pseudomallei
atgaaagcgaaagcgctgttgtgcgcggcatggtgcgtcgcgatatttggcaccatcgggatcggcgccgcgaacgcgatgcccgtgcgctggaggagtacggtcgtgcatgtcgtgctggaaggcaaggatctaaaggacgtactgagggattttgccgcgagtcaaggcgtcgcgacatcgattgccggcaatgttcaaggtaccgtcacgggccgattcgatctgtcgccccagcgctttctcgatacgctcgccgcgactttcggattcgtgtggttctacgatggcaatatcttgtcgatcacaaatgcaaacgatatgacgcggcaagtcttgccgctcgatcacgcttcgatcggcgaattgcgttccgcgttgcgccagatcggcatggacgacaagcgctttccgatcttctacgacgaggtgtccggcaccgtgctcgtcagcggtcccgcccagtatgtccagatcgtgaccgatatcgcgcagcggctcgacacgctgtcgggccgccgaaacggctcgacaatccgcatcttcaagttgaagcacgcgtgggcggccgatcgcaacgtgcagatcgacggaaacacggtgaccatgcccgggatcgcgaccgtgctggcgaacctgtaccgcgtgcgaggaagggcgggaaccggtcagtcgagtgcggcacccggcgtgcagcgggtgcagccgatgggcgacgtttccggcagtgcgtatggcgggaaccggctgatgcctccattgccgccgagcatgatggggggaggccgcggcgacgcattcgccaagggggcgtcgatcgacggcgaaagcgggggagccgcgagcgccgcgcctggcggagcgccccggacggaggaggtgtccgcggagcgcgacgagttgccgatcatccagcccgatccgatgacgaactcggtgttgatccgcgatttgcccgatcgccttgcacagtatgcgccgctcatccagcaactcgacatacggcccaggcttatcgaaatccaggcgcacatcatggagatcgacgacgacttgcttcgggagatcggcgtcgactggcgcgcgcataacagccacggcgatattcagacaggcacgggcaatacggcgcaaaacgattattcgggcggccagatcaatccgttcttcggtacgacgacgcttgcgggcaacgcggttgtcaacgcggcgcccgccggcgtgtcggtcacggcggtcgtcggggacgcggctcgatatttgatggcgcgggtgagcgcgctgcagtcgacctcgaaggtgaagatcgatgcatcgccacttgtcgcgacgctcgacaattcggaggccgtaatggataacacgacgcgctttttcgtcaaggtatcgggttacgcgtcggcggaactctacagcgtgtcgacgggtgtttcgctgcgcgttctgccgatgatcgtgcaagacggtagcgagacccggatcaagatgaatgttcacgtgacggacgggcaactgacaggcgaccaggtcgataacctgccggtcatcacgagcagcgaaatcaatacgcaagcgttcgtcggtcaggggcagagcctgctgatcgccggctacagtacggacaagcgcgcgaacggtgtggcgggcgtgccttggctgtcgaagatcccattgctcggtgcgctgtttcgataccacagcgattcgcagaaccacatggagcgcgtattcctgttgtcgccgcgaattatcgatccgggcacgtga

SEQ ID NO: 1001 - DNA, 1425 bp, Burkholderia pseudomallei
atgaacgctcgacgtccggcgttcggcctgattgcgtcgcacgcgtcacgccgccgggccgtcgaatccgttcgcgcccactttccgctcatgttcaccctctgtcttgcgatgaaacacacttcgaaccactccgacccttccggtgcgccgtcgtcagcgcgacgcgccgcatccgattcgtcccgcctcgtccgcggcatgcgctcgccccaacgcggcggcgcggcactggcgctggccgtcgcctcgctcgccggatgcgggggcggcgattcgggcgaacccgctccacgcgaattcgcgcccccgacagtgcaactcgcctacccgacgcaaccgaactcgcccgtcgcaccagcgcccaccgcgcacgtatcaagcggacacacgcctccggccacggcgcccgccgcgatgcccaccgcttcacccaccgcgacgcctaccgcttcacccaccgcgacggctgccgcttcgccctccgcgccatccactgcgacgcccaacgccccgcccgccgctccgccggccgtcgtcgccacccgcgtcccgccgacgcacgcggcgttgcgccgcccgacgatcgaactcgaattcgatcgcgcgatcgagccgggttcagtcccacacatcgcgctgcgcgccgacgatggcacgagcgtcgccgtcggcccgttgtcgtggctgagcgatcgccggatcgcgttcgcgccgcgcaaaccgctcaagtcgaacagccgctacgaaatcatggtgcccgccggcatcaggagcaccacgggcgaacggtcggctcatccgctaacgagcagcttcgataccgcgcccgtcacgccgccgcgcggcctgcccaatctcgacggcgcctcgtgcttcatcaacacggcgctgcaattggcggttcactcgtcggcgctcgacgacattctgtcgaacgaagccgtcccgcccgccgtccgcacgctgctcgaagactacgacgccgcatcggctgacgcactcgacgcgcagttggccgccgcggtcgccgcgctgcgcgccacgccggaggtcccggacagcgggccgggacaaacgctggaagtgatgcaagcgttgcggatgccgttatatgacacgagcagcgcgaacaacgcaacgaacaacgccgacgccatacgtcatgcgccgcccaacaccaaggcgttctttctgaactcctatccaccgctttcctacgcggatctgccgaaccacgaccggctcgtcgcgttcgactacagcacgggcggtcactatgtcgcttatgtgaagcgggatggaatctggtatcgaatcgacgatgcccaggtcagcgccgtcaacgaacaggacttgcttgccctgccggcgttcaaccccgctaacggcagcgtgtcgatcgaaatcgcgatctatcgatga

SEQ ID NO: 1002 - DNA, 1410 bp, Burkholderia pseudomallei
ttgagtaccgacgatctcgtcaaagcgccacctgagcatcgcgccaagatggctggcgtgaggctaggcattggttcggcgggagatcggcttaacttccttgaacgcaatggcgtgatgccggcagaagacaaggtactgacagccgctcgctatgcccacaacgttaaaatcgaccataagaacgcttcaaacctcgaattccagttaaatcgcatgagaatcggtgaagtttccttgccgaaacaggcaaagcctgattccatggaaatacgcaatgcgttagatgtaatcccgttggcgcttcccgataggaacgaaaagcatacgataccgaccgataaatacttgatgaatcggctgtcgtccggcgccgtggaacaagcgaggcatcacggctgtgaatttttctgtggcagcggccgagatgagatgctcaatcactacgctcatcgtgggttcgatcgtgccatcagcatttccagcaacacctcgacaaaattcgatttgctttctaactcttcgaatggtaaatcgctgctcgttctcagtggcatgagcagcaccacgcgaatcaagcatcaactgttacagttgcattttgccgatgtcgatttgaatcgagtcaaactcgtaggcgacatcaatttgctaaaggcaaaaagcggagacgatctccgtaaagagttgtcgcagcttccaccgatcccaagcaagacgcttttcatcggcgcccgttggcaaatcatggaatctctcgggaaacaacttttccatgtcggcgattcggcgaaagaaggtacggggtatggcaagctcggcgtgaaagaacacaaagttgccgattttgtattcgataccgcaacactgaatctcgatggacgtcagcatctcgttgccgcgctgcgtatgccaaatggcgatttggcttacgatgcaatgaaaggattccttgatcacgggttcaatcaggtcatcatgtgcggcgccggaggtcgattggcaggcgatgcgcaggtcggcgactacatgctgctggagcgcagtcaatatggagatcaaagcatttcactcgcacgggaatgcatccacgtgccgggcgccaaactcttcgagaatgctaaaccaacgagcaatgtcacggtcgattcgccattgcaagaaacacagcggtggctcgacgagaatcaggagacaggcaatgtcgatgttgaaaccgcgcatatccttcgcgcactcacggaagctggacctgacgtcaaagtcctccccggattgttcgtatcggatgtggtcggcgaacatccgctagaggggaagattagcagcgacgatgcgtatcggcgattgccggaatttgtcaccgcctcgctgggaatgatccgggaacaggacaccccactcgcatga

SEQ ID NO: 1003 - DNA, 1260 bp, Burkholderia pseudomallei
atgtcaatcggtgtgcaaagcagcggcatcaacatcagccacgcggagctgtcccggctcgtcgatgcgggcaagtccgagcagggcgacaaggcggttcgcgacgacgggcgcgcgctcgcgcgcgcggacgcggcgctcgcggccgtcgtcggcgagcgcgtggcggcgcggcgcgatgcggttgcgggctcgggcgcgcagcgcgtcgagctcgcccggccgaaacccgacgcgcagacgcgcgcgacggaccggcggacggtctccgggctggagcgcgagcacaagcggctcgccgcgagccagacgccgcgcgtgaccggcatgcacgatgcgctcgtgcagcgccacgtgtcgctcgacggcgcgaaggcggcgcacggcgaaggcgtgaagcgcgccgcgggcgatgcgccgcgcgcggcggcggacgcgccgcagcgcttcgcgttcgccgacgacaaggcgttcgacgcgatgctcgcgctcggcgccgcgatgcagaagaacgtgcagtcggatctcgcgatgcagggcaagctcacgatgctcgcgcacgacgcgatgatgagcgcggccgcgcaggatcgcagcatcggcgccgcgcagatgacggccgcgatcgcgggcggcgcgctgcaggcgacgacctcgctcggcggcgcgatgcagcagatgaagagcttgagcacgaagtcgatgtcgatcgaaaaggagctgaagccgcaggcggagctcaagcagttccacgcggagcaggcgctcgagctgcgcggcatcaacaagccggtgttgtcgaacgacgaagtgtcgcacgtgaagatcaagcgcgacaccggggagaccgtgcgccacgagatcgaccacggcggcgagcggatgagcgacgagcacgcgagcgtgctcgcgcaggaagcgcccgcccgtcagcaccggatcgacatgcacggcatgcgtcacgaggagaacctcgtgaaggcgggccgccagcagatgaagggcgatctgctccagtcgggcggccagatcggcaagaaccagatcgacggcgcgtcggcgcagcagcagggcgcggaccgcgccgagcagaaagaggacgagaacgcgcagcagaccgcgatggccgcggcgagcacgcgcgacgaagccgcgcatcgcagccgcgaagccgcgcagaaggcgatcgacgcggcgaagagccaggtggcgaacgacaacgcggtggccgcgcaggtggccggcaatctgcggacctga

SEQ ID NO: 1004 - DNA, 1863 bp, Burkholderia pseudomallei
atgtcatcgggagtgcagggcggaccggccgccaacgcgaacgcttaccagacccatccgctgcgcgacgcggcgagcgcgctcggcacgctgtcgccgcaggcgtacgtcgacgtggtgtcggccgcgcagcgcaattttctcgagcggatgtcgcagctcgcctccgagcagtgcgacgcgcagccggcggcgcacgacgcgcggctcgacgacaggccggcgctgcgcgcgccgcaggagcgcgatgcgccgccgttgggcgcgtcggacacgggcagccgcgcgagcggcgcggcgaagctgaccgaattgctcggcgtgctgatgagcgtcatcagcgcgagcagtctcgacgagctcaagcagcgctcggacatctggaaccagatgtcgaaggccgcgcaggacaacctgagccggctgtccgacgcgttccagcgcgcgaccgacgaagcgaaggcggcggccgacgcggccgagcaggccgccgccgcggcgaagcaggcgggcgccgacgcgaaggccgcggatgcggccgtcgacgccgcgcagaagcggtacgacgacgcggtgaagcagggcctgcccgacgatcggttgcagagcctgaaggcggcgctcgagcaggccaggcagcaggcgggcgacgcgcacggccgggcggacgcgttgcaggcggacgcgacgaagaagctcgatgcggcgagcgcgctcgcgacgcaggcgcgcgcatgcgagcagcaggtcgacgacgcggtgaaccaggccacgcagcagtacggcgcgagtgcctcgttgcgcacgccgcagtcgccgaggctgagcggcgcggccgagctcacggccgtgctcggcaagctgcaggagctgatctcgtcgggcaacgtgaaggagctcgaatcgaagcagaagctcttcaccgagatgcaggcgaagcgcgaggccgaactgcaaaagaagtccgacgagtatcaggcccaggtgaagaaggccgaggagatgcagaagacgatgggctgcatcggcaagatcgtcggctgggtgatcaccgcggtcagcttcgcggcggccgcgttcacgggcggcgcgagcctcgcgctcgcggccgtggggctcgcgctcgcggtcggcgacgagatcagccgcgcgacgacgggcgtgtcgttcatggacaagctgatgcagcccgtgatggacgcgatcctcaagccgctgatggagatgatctcgtcgctcatcacgaaggcgctcgtcgcgtgcggcgtcgatcagcagaaggccgagctcgccggcgcgatcctcggcgcggtcgtgacgggcgtcgcgctcgtcgcggccgcgttcgtcggcgcatcggcggtgaaggcggtcgcctcgaaggtgatcgacgcgatggccggccaactgacgaagctgatggattcggcgatcggcaagatgctcgtgcaactgatcgagaagttctccgagaagtcggggctgcaggcgctcggctcgcgcaccgcgaccgcgatgacgcggatgcgccgcgcgatcggcgtcgaggcgaaggaagacgggatgctgctcgcgaaccggttcgagaaggcgggcaccgtgatgaacgtcggcaaccaggtgtcgcaggcggcgggcggcatcgtcgtcggcgtcgagcgcgcgaaggcgatgggcctgctcgccgacgtcaaggaagcgatgtacgacatcaagctgctcggcgatctgctcaagcaggcggtcgatgcgttcgccgagcacaaccgcgtgctcgcgcagctgatgcagcagatgtcggacgcgggcgagatgcagacgtcgacgggcaagctgatcctgcgtaacgcccgcgcagtgtaa

SEQ ID NO: 1005 - DNA, 1107 bp, Burkholderia pseudomallei
atgagctcgatcatcggcggcgcgtcggccgcgcggcgcggcttttcgatcgacggcacggggagcgcggcgaaccggctcgacgcggagccgtcgctcgacgacgcgccgcagacgggggcggcgggcgcggccgacgtgcaggcgcaactcgccggcgtcgacgaggaggccgcgaacgccgccgcgcaattcggccggttccgcgcgtcggagcgcaaggggcggcgcagcgacgagctcgaacggattctcgacacggacgccgacgagaagctcgacgagctcgccgcgctgctcggcggccgcgcggacctcgcgacgctgctgcgcgacgcgcgcgagcgctttcgcgacgagagcgatctgttgctcgcgctgcgcgagctgcgccggcggcgccggctcgacggcgaatccgtcgacgcgctcgagcgcgcgatcgacgaactgctcgcgggcgacggcgccaagcggatcaaggcgggcatcaacgcggcgctcaaggcgaaggtgttcggcgcgcggatgcaactcgatgcgcgccggctgcgcgagctgtaccggcagttcctcgagttcgacggctcgcacctcgtcatctacgaagactggatcgagcagttcggtgcgagccgccgcaagcggattctcgactacgtgagcgccgcgctgtcgtacgacatgcagtcgcacgatccgagctgcgggtgcgcggccgagttcggcccgctgctcggcacgctgcatcgcgcgcgcatgctcgcgtcggccgacgagcagttcgtcggccggctgctcgacgacgcgctcgcgcgcgattgcgggctcaccgaggcgcgcgcgctcgcgacgatgctgggcggcctgcaacggccgttctcggtcgccgacgtgctgctgggcacgctcggcgatctgctcgagccgctcgcgcccgcccgtcgctcgcagttgttgcagctcgcgctgcgcgcgttcgcgggcgtgccgatcgcgctctacggcgacgccgacgcgcgccgcgcggcgctcggcgcgctcgaggagctgatcggcgcgacgtatgcgcgcgagcggcggcaggcgcgcccgcgcgccgactga

SEQ ID NO: 1006 - DNA, 1401 bp, Burkholderia pseudomallei
atgaaaaaactgaaatacgcggcagcgctgctgaccgcggtcgcgatgagcccgtcgtggtcgcaagcctcgaccctcgtcgcgcaatcgcacgtggacggcgtgagccgcgccgagccggcgaaaatcggcgagcagctcgccgcgcgccgcgcgtcgctacccactctgccgcgcccgctgcccacgctgtccgccggcgcgatccgccaagccggcctgcgcgcgccgctcgcgaagcgccaggcgacgctcgccgcgccggccgccgcgaccgtcgcgccgcccgtcgcgaactgcaccgacgtgacgatcggcgccgcgtacaacgcggccaccgcgcccgccggccaggccgactgcttccagttcgtcgcgccgagcgcgacgaagatcgtcgcatacgtcgtgaacctgcccgcgaacgaacagcacgacgcgcatctggtgcaggtcaacgaagacggctcgtggacggtgctcgacagccaggccgacctgtcgccaaacaagatcgtcgaggcggtgccgaacggcccggtgcgcctgctgctgctcgtcagcgcgcagcagggcgcgggcaacgcgccgttccagttccaggtgctcggcacgacgggctacgacagctacgagccgaacgattcgatcctgcatccgacgaagctcacgggcaaccagctgatcagcgcgaacctcgatacggtcgcggatttcgactactacgcggtgcaggtgccgtcgacgcagacggcgaactacgtgacgttcaagggcgcgggcacgcaaacggccgagctcgagaccgcgccgaacacgtgggcgacgctcgcgtcgggcacgtcgtacaacatcacgtcgcccgcgggcgcgacgctgatgttccgcgtctacgacaagggcacgaccgcgcccgccgcgcaggcatacacgctgcgcatatcggacggcgcgggcaccgcgggcttctatcgcttcctcgacgaagagaacatcacgcacctcgtgcgcggcaacgagaacgtcgcgcgggtcgtgtcggcgggcacgattgcgtgggactcgacgggcaacgtgcgcctgccgccgggcgagcgcatctggctgcgcgcgtacgatagcgcgggcccgaacggccccaacacgctgctgtcggaaacctcgggctacaccgacgcgaacggcaacctgctcgtcaatctgaatgtcggcgtgtgccagggcggcggaacgatgacgggcgacttcaatacgatgtcggtgccttcggatcgctggcggatcacctacaacccgtatgcgttcgtggtcgcgtatctcgacaacgcgcaaatccgggcgcagacatcgatcaagcacttcacgcacatctgcaccgagcagtacctcggccgcaagtaa

SEQ ID NO: 1007 - DNA, 480 bp, Burkholderia pseudomallei
atgtacgcgttagccgccgcactggccttcgcctcgctcgccgccgtctacgcggcgctgcagggcccggctgccgttcccgcgctgcaaccggcgcgcgccgcgcaggcgctcgccgacaatctcgccgtctatcgccaggcggcgctcgactacgcgcgcgcgcatccgggcacgcgcggcgcggtgccgaacgcgcggctcgcgtttcccgcgtggtatccgggcgcggacccgctctggcgcaactacgtcgagaacggcaccgtcgtcgcgtatgcggcgtccgcgccgcccgtgaacatcgcgggcgaggtcgcgacgctcgccgaaggctcgctgctcgcgggcgtcgcgtatcgcggcgcggtcgtgcgccccggtcgggcggatccgaacgcgcccgcgagcggcgtgccgctgcccgcggggctcgcgatcgccgacggcctgccggtctggatggggcaggcgtactga

SEQ ID NO: 1008 - DNA, 855 bp, Burkholderia pseudomallei
gtgatcatgaaaccactccgtctcccgatttccgccgccggcgcgcgccgcgccgcccgcctcgccgcgctcgtcgcgtgcgtggcgctcttcgccggctgccggcaggagctgtacggcggcctcgccgagcgcgactgcaacgagatgatggccgcgctgctgcaaaacggcgtcgacgcgcagaagaagacgcccgacggcggcaagacatggacgctcgccgtcgacgacaagcagatcgtcaaggcgatggaagtgctgcgcgcgcgcgggctgcccgcgacgcgctacgacgatctcggcgcgctgttcaagaaggacggcctcgtgtcgacgccgaccgaggagcgcgtgcgcttcatctacggcgtgtcgcaggagctgtcggacacgctgtcgaaaatcgacggcgtcgtcgtcgcgcgcgtgcacatcgtgctgccgaacaacgatccgctcgcgcaggtcgcgaagccctcgtcggcctcggtgttcatcaagtaccggccgaacgcgaatctcgcgacgctcacgccgcagatcaagaacctcgtcgttcatagcgtcgaagggctgacgtacgacgaagtgagcgtcacctccgtcgcggccgatccggtcgatctcgtgtcggccgcgcagcccgccgcgcagaactcccgcggcgcgacgctcgtcggcgtgctgatcgcgctcgccgtgggcggcgcgctcgcggccgcgggcggcgcgctgtggtggcgcgcgcgcaagcgcggcggcggcgcgggcgcgcacggaatcgccgcgcggccgcgcggcggcgcccgcgacgcgaaggccgccgcgccccggcaggccggcgcgcaatga

SEQ ID NO: 1009 - DNA, 984 bp, Burkholderia pseudomallei
atggctaagcccgcaaagcgcgttgccgtcaccggcgccgcaggtcagatcgcttactcgctgctgtttcgcatcgcgaacggcgacctgctcggcaaggatcagccggtcatcctgcaactgctcgacctcccgcaagcccaggccgccgtcaaaggcgtcgtgatggaactggacgattgcgcgttcccgctgctcgcgggcgtcgtgatcaccgacgacccgaaggtcgcgttcaaggacgccgacgtcgcgctgctggtgggcgcgcgtccgcgctcgaagggcatggagcgcaaggatctgctgtcggcgaacgccgagatcttcacggtccagggcgcggcgctgaacgaagtcgcgagccgcgacgtgaaggtgctggtcgtcggcaacccggcgaacacgaacgcgtacatcgcgatgaagtcggcgccggatctgccgaagaagaacttcacggcgatgctgcgcctcgaccacaaccgcgcgctgtcgcagctcgccgcgaagtcgggcaagccggtcgcgtcgatcgagaagctcgccgtgtggggcaaccactcgccgacgatgtaccccgacttccgcttcgcgaccgccgagggcgaatcgctgctgaagctgatcaacgacgacgtgtggaaccgcgacacgttcatcccgaccgtcggcaagcgcggcgcggcgatcatcgaagcgcgcggcctgtcgtcggcggcgtcggcggccaacgcggcgatcgaccacgtgcgcgactgggtgctcggcacgaacggcaagtgggtcacgatgggcatcccgtcggacggctcgtacggcatccccgaggacatcatctacggcgtgccggtgatttgcgaaaacggcgagtacaagcgcgtcgagggcctggaaatcgacgcgttctcgcgcgagaagatggacggcacgctcgccgagctgctcgaggagcgcgacggcgtcgcccatctgctgaagtaa

SEQ ID NO: 1010 - DNA, 2250 bp, Burkholderia pseudomallei
atgacatccacattcctgcgtcacgcgcccaccgcgcgtggagaccacgcgcgccgccggcggcgcgcgatcacgcttaccgttcccgcgctcgccgcgggcgcctttcacctcgcgccggccgtcgcgcagacgagcgaggccgtgcacggccacggcacgctcggcgcgtccggcgtagcgagccgcgccgacaccgacgcggcgagcgccaaatcggacggcgcggttcgcgaagcggcgagcgccgcggcgagccgcacgacgaccggcgccgcgccggacgccacgacgctgccgacgatcgaaatcgtcgcggcgcccgaatcgacgccgctcgtcgtcgtcaccgatccgaagacgccgcgccagccgctgcccgcgagcgacggcgccgattatctgaagacgattcccggcttcgcgtcgatccgcagcggcggcacgaacggcgacccggtgctgcgcgggatgttcggctcgcggctgaacattctcgcgaacggcatgccgacgctcggtgcgtgtcccggccggatggacgcgccgacgtcgtacatcgcgcccgagagctacgacaaggtgacgctcgtcaaggggccgcagaccgtgctgtacgggccgggcgcatcggcgggcacggtgctgttcgagcgcgtgacgccgcgcttcaagacgccgggcatgcgctttgacggcagcgtcgtcggcggctcgttcgggcgcaacgatcagaacgtcgacgtgacggccggcacgcccgacttctacgggcgcgtgagcgcgaaccatgcgcactcgcaggactacgaggacggcaacggccgcacggtgccgtcgcaatgggacaagtggaacgcggacgcggcgctcggctggacgcccgacgacaacacgcggctcgagctgacggcgggcacgggcgacggctacgcgcgctatgcgggccgcggaatggacggcgcgcatttccggcgcgagacgttcggtctgaagttcgacaagaagcacatcggcgacgtgctcgatcgcatcgatgcgcaggtcttctacaacgaagccgatcacgtgatggacaactacacgttgcggatgcccgatccgacgagcagcatgccgatgcgcatggcctccgaagtgcgccgccgcacgctcggcgcgcgcgtcgcggcgacgctgcgcttgaccgacgcgttcaagctcgtgacgggcgtcgatgcgcagtcgaaccgcctcgactcgcgctcggcgatggggatgcagaactacggcgacaagccgtggaatccgcaggcgaacatgtggaacgcgggcgcgttcggcgagctgacctggtatgcgagcgatgcgtcgcgcgtgatcggcggcgcgcggatcgactatgcggccgcgcgcgacaagcgcgcgacgacgggcggcatgaagatgagcatgcgcaatccgacgttcgacgatcttcgctcgcgcgtgctgccgagcggcttcgtgcgctacgagcgtgatctcgcgtcgctgcccgtcacgtggtacgcgggcatcggccatgcgcagcgcttccctgattactgggagctgttctccgccaagcgcggcccgaacggttcgatcaacgcattctccgcgatcaagcccgagaagacgacgcagctcgacatcggcgcgcagtacaagagcgacaagctcgacgcctgggtgtccgcctatgcgggctacgtgcaggacttcatcctgttcgactatgcgacgggcccgatgggacagatcacgcaggcgacgaacgtcaacgcgcagatcatgggcggtgaggtgggcgcgtcgtggcgtccgctcgcgccgtggcgcttcgaagggtcgctcgcgtatgcgtgggggcgcaacgtgcaaagcggtgcgccgctgccgcagatgccgccgctcgaggcacgcttcggcgtcgagtacactcgcgggccgtggtcggcgggcgggctgtggcgggtcgttgcgccgcagcatcgctacgcgctgaacgagggcaacgtcgtcggcaaggactttggtccgagcgccggtttcggcgtgctgtcgctgcacgcgcagtacaacgtgagcaagacggtgcagatctcggtcggcgtcgacaacgtgctcgacaaggcttatgcggagcacctgaacctcgcgggcaacgccggtttcggctatccggcgaatctgcctgtcaccgaacccggccgtaccgcgtgggttcgtttgagcaccaagctctga

SEQ ID NO: 1011 - DNA, 1719 bp, Burkholderia pseudomallei
atgcaaaaactgttcaataaatcggccatcgcaatcggcatttccacccttctcgttctgtccggctgcggctcggtcgacggcccgtcgctgtcggccagcggcgtcaagcccgccaccgtcggcaatacggggacttcggggacgtccggcacttccggtacgtcgggtacttccggcacgtccggcacctccggtacgtcaggtacttccggcacgtccggcacctccggtacgtccggcacctccggtacgtctggcacgtccggtacgtctggcacctccggcacctccggcacgtcgggtacttccggtacgtctggcacctccggcacgtctggcacctccggtacgtccggcacctccggcacgtctggcacctccggtacgtccggcacctccggcacctccggcacgtctggcacgtccggtacgtctggcacctccggcacgtcgggtacttccggcacgtcgggcacctccggtacgtcgggtacttccggtacgtccggtacctctggcacgtcaggcacctccggtacgtcgggtacctccggcacgtcaggcacttccggtacgtcgggcacgtccggcaccgcctcctccccgctcggcaacatcctcgcgcaaaccggcaacctgatcaccgcgacgggcaccgtcgtctccgccaccggcaaccaaatctccggcacgtcggtgccgggcgtgaacggcgcgacgacgacgaacctcggcaacgccgtcagctcgctcggcaacggcgtccagacgctcggcaacggcacagccgccggcctcggcacgctcggcacgtcgacgaatccgctcggcccgacgctcacgtcgacctccggcgtcgtctcgaacgtcggcaacgcggtctcgtcgctcggcggcgtcgtgacgagcatcggcaccggcccgctcgcgccgctcgcgcccgtcacgtcgccgctcggcggcgcggtcggcacgctcggcagcaccgtcacgcaagtcggctccggcctgaacaacgtgctcacgagcgcccccgtccagcagctcgaaaccggcgtcagctcgatcatcaacccgatctcgaacgtcgtttccggcacgacgcagacgatcggcaccgccaccgggctcggcgcacccgtcaataatctgctgaccaccgtcggcaatgggctgaacgcggccggcgcgaaggtgtcgggctcgacgaacaaccaggtggtgcaggcggtcggcggcgtcgtcagccagctcggcaacacggtcacgagcgtcggcggtctgctgacgggcggcaccaccaacccgctcgcgccgatcaccggcatcgccggttcgctgagcggcacgctcggcgccaacgcgggcctgaacgcaggcgcgacgcaacccggcacgacgacgaacccgctcgcccccgtcaccggcctgctcggcggcctgtcgggttcggcgggcggcaacgcggcggccggcctcaccgccgtgctcgcgcccgtcacgaatgtcgtcggctcgctgaccgccggcgtgaacggcaccgtcgccgccccgtcgcccgccccgaccaccggctcgacgacgaccgcgcccgccacgggtgtggtcggcagcctgacgggcggcacgaccgcgagcggcacgtcgacgacgaacctgctcgcgcccgtgaccaacctgatcggcgggctgctcggcggcgtgtcgggcaagtag

SEQ ID NO: 1012 - DNA, 1503 bp, Burkholderia pseudomallei
atgtcaatattgattcgtactgcttcgttcaaggcgaccgtcctgtgtgccgcgctggccggcctcgtttcggccgcgcaagcggaaaccgcggccgcgccccaggtgccggggcccgccgacgcggtcaatcagttgatcgtcaagttgcgcgcggtgaagacgccgcccggtgcgacggccgcgaaggccgagcgcgcggacgttcaggccgtcatcgatcgcgtgctcgccgcgcgcaatgcgcgggcggcggggcgtgcgttcggcgcggccgccgcatccgcgcccggcaatccggacgaccccgccgcgggcattcgcatcaagcgcgacatgtcgggcggcgcgaccgtgctgtcgctgcagcgccacgtgtcgctcgcgcaggccgaggcgctcgcgcgcgacttcgcggcggacggcgcgatcgaatatgcggagcccgatgcgcggatgcatccgttcgtcgtgccgaacgatacgcgctattcggagcaatggggctacttcaatccgaccgccggcgcgaatctgccgaaggcttgggatcgcacgaccggctccgcgcgcgtcgtcgtcgccgtcatcgataccggctaccgtccgcatgcggatctcgccgcgaacctgctgccgggctacgacttcatctccgatatcccgagcgcgaacgacggcaatggccgcgacagcgacgcatcggatcccggcgactgggtgagcgcgcaggaagacggcgatccgagcggcccattctatggctgcggcgcgagcgacagctcatggcacggcacgcacgtcgcgggcacgatcggcgcggtgacgaacaacggcgtcggcgtggcgggcatctcgtgggtcggcaaggtgctgcccgtgcgcgtgctcggcaagtgcggcgggatgctgagcgacatcgccgacggcatgcgctgggcggcgggcctgccggtgccgggcgcgccgtcgaatccgaacccggcgaaggtgctgaacctgagcctcggcggatacggccgcacatgcagctcgacgtaccagaacgcgatcaacgaaatcacgtcgcgcggcgcgaacgtcgttgtcgccgcgggcaataacggcggctcggtgtcgacgactcagccggcgaattgccggggcgtgatcgcggtcggcgcgatcgacagccgcggcgtgcgcgcgagcttcagcaacaccggcgccgcggtgaagatctccgcgccgggcgtcggcattctgtcgacgctcaatgcgggcaagacctcgccgggcgcggacagctacgcgagctatagcggcacgagcatggcaacgccgcatgtcgcgggcacggtcgcgctgatgctcgccgtcaactcgacgctgtcgccttcgcagatcttgcagcggctgcaatcgagcgcgcggccgttctcgagcggatcgagctgctcgacgagcacgtgcggcgcagggctgctcgacgcaggcaacgcggtcgacgccgccgcgcagtga

SEQ ID NO: 1013 - DNA, 1665 bp, Burkholderia pseudomallei
ttgcgccgcgcgttgccattccgctaccactatcaatcgcacacgatgaaacacacgcatgccttcgcggccgtgctggccgcgctcgccctgacgatcgcgccatccgccccggccgtcaccgttgcctcgaatgtcacgctcgcggatcagcaggacctcacgcggcaggtgcccgcggaggtcgaatcgctcgaccccgcgcacatcgaatcgtggaccggcaacacgatcggcctggatctgttcgaggggctcgcgcgcatcgacgcgagcggggcggtggtgccgggcgtcgcgcaggcgtgggagcacaaggcgccggatacgtggatcttcaagctgcgccgcgacgcgaagtggagcaacgggcagcccgtgacggccgcggatttcgtatacgcgtggcagcgtctcgccgatccgaagacgggttcgaaatacacgatcctcgtcgagttcgtgaagaacgcctcggcgatcatcgcgggcaagcagccgcccggcgatctcggcattcgcgcgatcgatccgtacacgatcgaggtgaagaccgaggtgcccgtgtcgtatttccccgagctcaccgcgatggcgccgctcacccccgtgaacaaggacgcggtcgcgaagttcggcgacgcatggacgcgcccgaagaacatcgtgagcaacggcccttacacgctcgtcgactggcagccgaacaaccggatcgtgatggcgaagagcgacaagtactggaacgcgcgcaacgtcgtgatccgcaaggtgacgtacctgccgatcgagaacgacgagaccgcgctgcggatgtaccaggcgggccagatcgactacacgtattcgattcccgcgggcggcttcggccagatcagcaagcagttcggcaaggagctgcgcccggggctgcagctcgcgacgtattactactacctgaagaacagcgatccggcgctcaaggacaagcgcgtgcgcgaagcgctcgcgatggtgctcgaccgcgagatcctcacgtcgaagatcacgcaggcgggcgaagtgccgatgtacgggctgatgccgaagggcgtgaagggcgtgcagcggccgttcacgccggactgggcgtcgtggccgatggcgaggcgcgtcgactacgcgaagaacctgctgaagcaggcgggccatggcgacgcgaatccgctcacgttcacgctgacctacaacacgaacgacctgcacaagaaggtcgcgctgttcgcggcgtccgaatggcgcacgaagctcggcgtgacggcgaagctcgagaacgtcgagttcaaggtgctgatgaagcagcgccacgacggcaaggtgcagatcgcgcgcgacggctggttcgccgactacaacgacgcgatgacgttcttcgacctgatccgctgcggcagctcgcagaacacggtcggctactgcaacccgaaggtcgattcgctcgtcgccgaggcgaaccagaagctcgatgacggcgcgcgcgcggcgctgctcacgcaggcgcacgatctcgcgatgaacgactatccgatggtgccgctcttccagtattcggcggaccgcctcgtgaagtcgtacgtcggcggctacacgctgacgaactacatcgacatgcgcgcctcgcaggacatgtacctgatcaagcactga

SEQ ID NO: 1014 - DNA, 1692 bp, Burkholderia pseudomallei
ttgcggacgacgaaatctcccggcatctccgtgattcggcagcggctcgccgttgcgctgccgcttgcgttgacgctcaccctcgcgagctgcggcggtgacgatctgacgcccgccgcgcagcgctgggcgatgcccggcaccgaactgccgctcgggccgcagggcctcgcgcagagcgtgtcgacgcagacgctcgccgcaggcgtcgcctattaccagatcaagcgcggcgcggcgagcgcggccgatttctggaccgtcaacctcggcttctacgcgacgcaggccgcggcgcaggccgatgcggcgaatctcgcggcggccggcttcgcgacgcgcgtcgacgcgtcggcgggcaccgacctgcagggcaaggtgctcggctactggctgtcggccggccgctacgcgacgcaggccgaggcgacggcggccgccgcgcgcatcgcgcaggccacgcagaaccgctacaagccgggcacgcggcatacgtcgctcgccggcgcgccgacgacggggccgtggatcgtcaacgtgctcgcgatcgacccgtcgcgcgccggcgcggcgctgtcgctcgcgctgccgggcggcaacgatctcggtgcgggcggcgagacggtttcggccgcgcgggcgcgtgtgaacgcgctcgccggcgtcaacggcggctttttcacgaacatcaatccgttcggcgcgccgctgccgccgcgctcgcccgtcggcgcgacggtagtcgacgggcggctcgtcgcggccgcgatcggcaggcgccccggcctgctgctcgcgcgcgacgcgaacggccgccaacgcgcgacggtcgtgcgcaatctcgcgacggcgatcacgctgaccgacgcgcaaggccgtgcgatcgcggtccagacgctgaaccggccgatcctcggtacggtcgtcaattgcggcgcgcaggcgcgcacgccgacgagcgagccggcgcaggacacggtgtgcacgaactacgatgacctcgtgatgtacgactcgctatatctgcgcggcggtgcgtcgaacacgctcgtcgacgccggctaccagggcgcgcgatacgaactcgtggtcgacgcgaacggcgccgtcgtcgccggccatgcgacgctcggcgcgccgccgccgccgaacggctacgtgctgcaggggctcggcgcgagcgccgcgtggctgcaggcgcatgcgacgccgggcacgcgcctcgcggtatcgcgccggctgtcggccgacggcgcggatctcgcgctcgcgtcgggcacgtcgctcgtcgaggcggggccgacgctgtccgtgccgaatctcgcgcaaagcgccgcgcaagagggcttcgcgccgacggtgggcggcgtcgacgcgggcgaaggcgccgcggcgaacggcaactggtacaacggctggtatgtcgcgcgcaatgggcgcaccgcggcgggcgtcgcggcggacggcacgatcctgctcgtcgagatcgacggccggcagcccacgttgagcgtcggcacgagcattccggagacggcggcggtgatggcatggctcggtgcgacgtcggccgtcaatctcgacggcggcggctcgagcaacatggtggtcggcggcaagatggtcggacatccgtccgacgccgtgggcgagcggggcgtcggcgatacgctgatgctgctgccgggctga

SEQ ID NO: 1015 - DNA, 543 bp, Burkholderia pseudomallei
atgaaccgattttcattgcccccccgcccttcgcggatgcgcggcgccgtcgcggtggaattcgcgatcgtgatgattccgctcgtgctgctcgcaaccggcgtcgcggagttcggccgcgcgatctatcagtacgaggcgctgacgaaggcgacgcgcgacgcggcgcgctacctgtcgacgtacctgccgaccgatcccgcgtacccgctcgcgcaggcgcagtgcctcgccgtctacggcagcaccacctgcggctcgacgggcagcgagctcgcgccgggcctcgcgacgtcgatggtcgtcgtctgcgacgccgcgcacgcgcccgattgcagcgactcgtccgacccggcgcagttcgcgaacgtgccgacctacgacacgaacaacggctcgcccgacccggcgagcctcgccggcagcatgaatctcgtcgaggtcaagatcaagggctatcagtaccggccgattcccgcgtttccggggctgccgaacctgagcttcggcaacatcgtcaccgtgatgaggcaagtgtcatga

SEQ ID NO: 1016 - DNA, 984 bp, Burkholderia pseudomallei
atgaataagatgcgaaccaccgcgtcggcgctcgccgtctgcctgcttgcgagcggctgcgcgaccggccccaaccggcacccgggcgatccgctcgagccgatgaaccgcgccgttttccagttcaacgacgcggtcgactccgcgatcgccgtgccgatcgcgaagggctatcaaaaagtaacgcccacgccgctgcgcacggcgatcagcaatttcttctcgaatctcggcgatctcggcaacatcgcgaacaacctgctgcagctccggatcaccgatgcgacacaggacgtgatgcgcgtcgcgatgaactcggtgttcggcgtcgccgggctgatcgatgtcgcgtctctcgccgggctgccgaagcaccaccaggacttcggcctcacgctcgcgcgctggggcgtgccggccggcccgtatctggtgctgccggtcttcgggccgagctcgattcgcgacggtgtcggccgcgcggtcgacgtccgcttcaatctgctgaattacatcgagcctgccgcgcgcaatccgatgtacatcgcgcagttcatcagcgcgcgctcggatctgctcggggcgaccgatctgctgcagcaggcggcgctcgacaagtactcgttcgtgcgcgacgcatacgtgcagcagcgccgctcgctcacgtatcacggcagaagcgacgacgaatcgctgccgcactacgacgagcccggcggcgagccggcgggcggcccgggcggcggcgcgccgggcggcttgccgcaatacgaggatccgggcgagggcgcgggcggcatgccgccgggcggcgcgcgcgagcccgccggcctgccgcagtatcaggacccgggcgacgaagcggcggcgtcggcagcggcatccgccgcttcatccgcttcatccgcttcatccgcgtcgccggcgtcgtcagtcgcgccggcttccgcgtcgtccgcacagtctccgtcgtcgccgaactga

SEQ ID NO: 1017 - DNA, 435 bp, Burkholderia pseudomallei
atgagcaatgtgacgcgttacgacccgttttcgctggagcctgtgtccgatctgttccaaggtttgttccgtccgctgcgcggcatcgcggacgccgacgacgagaagctcgcgtcgatgaagatcgacgtgaccgaaaacgaccaggcctacgccgtcaaggccgagctgccgggcgtcgacaagaatgacatcaacgtgcagatcgacggcaataccgtgtcgatttccgcgaaggtcgagcgaaacaaggaactgaaggaaggcgagcgcgtgattcggcgcgagcgctattcgggcgagttcgcgcgaaccttctcgctcgcgaacgaactcgaccgcgacgcggcgagcgcgcagtatcaggacggcgtgctgtcgctgacgctgccgaagaaggcgagctcggagaagaagaagctgacgatcggctga

SEQ ID NO: 1018 - DNA, 2274 bp, Burkholderia pseudomallei
atgacaagaactcgctttgctttgcggcgcgtcgcaacggcgctcgtcgtcgccggaattgtcgccgcgcaggccgctcacgctcaggtcacgctcaatttcgtcaatgcggacatcgatcaggtcgccaaggcgatcggcgccgcgacgggcaagacgatcatcgtcgatcctcgcgtcaaggggcagctgaacctcgtcgccgagcgtccggtgcccgaagatcaggcgctgaagacgctgcagtccgcgctgcggatgcagggcttcgcgctcgtccaggatcacggcgtcctgaaggtcgtgccggaagccgacgcgaagctgcagggcgtgccgacctacatcggcaacgcgccgcaggcgcgcggcgaccaggtggtcacgcaagtgttcgagctgcgcaacgaatcggcgaacaacttgcttccggtgctgcgcccgctgatctcgccgaacaacacgatcaccgcgtatccggccaacaacacgatcgtcgtcaccgattacgcggacaacgtgcgccggatcgcgcagatcatcgcgggcgtcgacagcgcggcgggctcgcaagtcgccgtcgtgccgctcaagaacgcgaatgcgatcgacatcgccgcgcaactgacgaagctgctcgacccgggcgcgatcggcaacaccgacgcgacgctgaaagtcaccgtgcaggccgatccgcgaaccaatgcgctgctgctgcgcgcatcgaacgcgcagcgcctcgccacggcgaagaagatcgcgcagcagctcgacgcgccgagcggtgtgccgggcaacatgcacgtcgtgccgctgcgcaatgcggaagcggtgaagctcgcgaagacgctgcgcgggatgctcggcaagggcggcggcgaaagcggctcgtcggcgagctcgaacgacgcgaacgcgttcaatcagggcggctcgcaaagcggctcgaacttctcgacgggcgcatcgggcacgccgccgctgccgtcggggctgtcgtcgaattcatcgggcggcgcgggcggcacgacgggcggcggcgggctcggcaatgcggggctgctcggcggcgacaaggacaagggcgacgacaaccagccgggcggaatgatccaggcggacgcggcgtcgaattcgctcatcatcaccgcgtcggatccggtataccggaatctgcgggccgtgatcgaccagctcgatgcgcggcgcgcgcaggtgtacatcgaggcgctggtcgtcgagctgcaggcgacgaccagcgccaatctgggcattcaatggcaggttgcgaacaacgcgctctatgcgggcaccaatctggtgacggggcagaccggcctcggcaacagcatcgtcaatctgacggcgggagccgtgaccaatccgggcggcacgctggggtcgctgggctcgatcacgaacggcctgaacatcggttggttgcacaacatgttcggcgtgcagggtttgggcgccttgctgcagttcttcgcgggctcgagcgacgcaaacgtgctgtcgacgccgaacctcgtcacgctggacaatgaggaggcgaagatcgtggtcggccagaacgtgccgattccgacgggctcgtactcgaacctgacgagcggcacgaccgccaacgcgttcaacacatacgaccggcgcgatgtcggcctgacgctgcacgtgaagccgcaaatcaccgagggcggcattctgaagctgcagctgtacacggaagattccgcggtggtgcccggcacgaacacgacgtcggccaattcgcccgggccgacgttcacgaagcgctcgatccagtcgacggtgctggcggacaacggcgagatcatcgtgctcggcgggttgatgcaggataactaccaggtatcgaatacgaaggtgccgctcctcggcgacattccgtggatcggccagctgttccgctccgagggcaagacgcgccagaagacgaacctgatggtgttcctgcgccccgtgatcatcaacgaccgcgagaccgcgcaggcggtgacctcgaaccgctacgactacatccagggcgtgacgggcgcgtacaagtcggacaacaacgtcattcgcgacaaggacgacccgatcgtcccgccgatgccgctcggcccgagccagggcggctcgcccgcgatgaacctgttcgacctcgacaagatgcggcgccagcagctcgctccgcccgcgcccgccagcgcgccggcggcggcgagcgacgccggcaccgcgtcgccgggagcccgtccgtga

SEQ ID NO: 1019 - DNA, 729 bp, Burkholderia pseudomallei
atgaaaccagccgtccgctctgagcgccgcgcgcccggcgagaaacgcccgcggcgggcgcgccgcgccttccggcgaggcgcgcgccacggcgcgcgcggcttcacgctgatcgaaatgatgatcgcgatcacgattctcgcggtgatcgcgatcctgtcgtggcgcgggctcgaccagatcatccgcggccgcgagaaggtggcggccgcgatggaggacgagcgcgtgttcgcgcagatgttcgaccagatgcgcatcgacgcgcggcgcgcggcgaccgacgacgaagcgggccagcccgcggtgcgcgtcgcgggcgacacgctgcagatcgtgcgcgagttcgacgcgccgggcgcggcgccgcgcctgcaggtcgtgcgctaccggatttcgaacgggcgcgtcgtgcgttacgcgtcgccgccgatcggcgacgtcaacgcgctgcgcgacgcgctgcgcggcggcgataccgaaggctggagcgaggtggcgctgatgcgcggcgtcggcatgatcaacgcgcggctgtacgtgccgaaggtcggctggacgaccagcatgccggacgccgacaacgcgctcgagcagaacaacaacgcgctcaaggtgccgatgctcggcaacgcgccgccgccgcgcgcggtgacggggctcgaggtgagcatcggcgcgacgtcgctgcgcgtgccgatcacgcgcattttcctgatcggggagtga

SEQ ID NO: 1020 - DNA, 1128 bp, Burkholderia pseudomallei
ttgaaacgacaatacctggcactttccatcgcgacggccgcctgcgcggcgccgcaagcgcacgcgcagtcgagcgtccagctctacgggctcatcgacctgagcgttccgacctatcgctcgcacgcgaacgcgaagggcgatcacgtgatcggcatggggctcggcggcgagccgtggttcagcggcagccgctgggggctgaagggcgcggaggacatcggcggcggcacgaaggtgatcttccggctcgaaagcgaatacacggtagccgacggcaacatggaggacccgggccagatcttcgaccgcgatgcgtgggtcggcgtcgaaaacgacacgttcggcaagctcaccgcgggcttccagaacacgatcgcgcgcgacgcggcggcgatctacggcgacccttacggctcggcgaagctcacgaccgaggaaggcggctggacgaacgcgaacaacttcaagcagatgatcttctacgcggccggtgcgacgggcacgcgctacaacaacggcctcgcgtggaagaagctgttcggcaacggcatcttcgcgagcgcgggctacgcgttcagcaattcgacgagcttcgggcagaactcgacctatcaggtcgcgctcggctacaacggcggcccgttcaacgtgtcgggcttcttcagccacgtgaaccacgcgggctacgcgaacaagtcgttctcggtcggcggcaactacacgttcgacatcttccgcgtgaacgccggctacttccgctacctgggcgatcagggcgcgctcggccagcgccaggacaacgcgtggacggtgtcgttcaaggtcgcgccgaagggcgcgctcgactacgagctcggctatcagcagatgcgcgtgcacaacgccgcgtacaacagcgacggcaacgtgccgaacgcgaacatcggcgacttcagcctcacgtcgggcgtcggcaacggcttcaaggaaacgctgtacggctcggtgttctaccacctgtcgaagcgcaccgagctgtacctcgccggcgactacatgcgcctgcacggcggctatacggtcgcgtccacgcacggcgcgaccaatcagctcgagctgacgaccggcatccgcacgcggttctga

SEQ ID NO: 1021 - DNA, 1158 bp, Burkholderia pseudomallei
atgaaaacgatctggaagtttttcggtctcgcggccgctgtgtcggtgttacttgccggctgcggcggcgggggcgacaacagtgggcaaacgggcacgctgcacgtcgcgatgacggatgcgccgtcgtgcggttttgatcatatctatgtgaccgtcgcgaaggtgcgcgtcaacatgagtgcgcaagcaggcgacaacgattcgggctggaccgacgtcgcgctcgcggcgccgcaaaaggtcgacttgctgtcgctgaccaacggcgtgctcgccgacctcggccggaacgcgctgccggccggccagtaccagcaagtgcgcctcgtgctcgcgcagaaccagggcaacacgcttgcgaactcgatcgtgccgacgggcggcaccgagcagccgctcgcgacgccgagcgccacgcaaagcggctacaagatcatcacgccgttcacggtgcagccgaacacgctcgtcgatctcgttctcgacttcaatgcgtgcaagtcgatcgttcagcgcggcaacggcacgtacgcgctcaagcctgtcgtgaccgccacgccgacggtcgtcagcggcgcgatcgacggctatgtctcgccgaccgaagccggcgcgacggtctacgcggagcagaacggccacgtgatcaagggcacgctcgccgacagcaccggccacttcgtgctgacgccgctcgtgcagagctcgacgaacggcaactacgacatcgtgatcacgcagaacaacgtgtcgaccgggatcgtacgttcggtgcctgtcgtcgtgaacacgacgacgtcggtatcgacctcgtccgcgccgatcacgctgcccgcatcgacgatgaacatggtgagcggcacggccacggcgagcgcggatgcgatcctgcgcgcgctgcagatggtgaactcgctgccgtatgagattgcgtcgacgaacgcgaatctcgacacgggcgcctatgcactgacgctgccgaccgcggcgccgatcgtcggcacgtattcgggttcgctgccggtcgcgatgagcgcggcgccgagcgccgcgggccagtacacgatcgaggccgatgcggctaacggcgcgacgcagcagcagccggcgaacatcacggcgggctcggtctcgaacgtcaatttcgggttctga

SEQ ID NO: 1022 - DNA, 1956 bp, Burkholderia pseudomallei
atgtcaaccagcctttttcgagtatatcgcgcggtcgcggcgcccctcgtcgcgatcgcgctggccgccgtggcggccgcctgcgccgcgcagaccgccgacgaagcgtcgtcgaacgacgatcgggtgttcgtccagctgcgcgaggccgcgcgcaggaacgatccggtgcgcgccgcgcagctcgccgcgctgatcccgaattatccggcgccgtcatatctcgagtacttccagatcaagccgcagttgttcgattcggcgggccatgcgcgccttgacgcgccggacgcgccggtgctgtcgttcctgtcgcgctacgacggccaggcgatcgccgaccgcatgcgcaacgattacctgctcgtgctcggcgcgcgccatgactggcgcgccttcgacgagcagtacaagcgcttcgtgctcgacgacgacacgcaggtcaagtgctatgcgctcgaatcgcgcgcatcgcgtggcgagaacgtcgcggacatggcgcgcgagctgctcgtcgagccgaagtattacggcgacgcgtgcgtcgacctcatcacggcgctcgcgacgaacaagcagttctcgagcgacgacgtgtgggcgcaggtgcgcctcgcgtacgagcagaactacacgacgctcggcggcaagattgccgacgcgctcggcccgcgcccggtcggcttcgatcaggtgacgagcgcgccgccgctgttcctcgcgcgcggcgtgggctccgacgcgacgtcgcggcaactcgcgctcgtcgcgatcacgcgcatggcgcgcaacgatccggaagcggcggcggggcagctcgcgtcgctcgcgtcgacgctgtcggcggccgagcaggcgatcggctggggcgagatcggctatcaggcgacggtcaagcggctgccgcaggccgcgtcgtggtaccggaaatcgatggacgcgccgctgtcgaatccggcgtacgaatggcgtgtgcgcgcggcgctgctcgccggcgactggccgatggtgcgccgctcgatcgagcagatgcccgagcggctgcgcgacgacacggcatggatctactggcgcggccgcgcgctgaaggagagcggcgacaccctcaaggcgaaccaggagttcgagcgcatcgccgggcagttcaacttctacgggcagctcgcgggcgaggagctcggccagaagacgacgatcccgccgcgcacgaaggtgacggacgccgagatcgacgcgatgagcaaggtgccgggcttcgcgctcgcgcagcgcttctacgcgctgaacctgcggctcgaaggcaaccgcgaatggaactggccgctgcgcgggatgaccgatcggcaactgctcgcggcggccgagtacggcaagcgcgtcgacctgctcgaccgcacggtcaacaccgccgatcgcacgacggccgagcacgatttctcgctgcgctatccgtcgccgtatcgcgacatcgtcgagcgctacgcgcggaccaacgggctcgacgtcgaatgggcgtacgggctgatccgccaggaatcgcgcttcatcacgaacgcgcgctcgacggtgggcgcaggcggcctgatgcaactgatgccggcgaccgcgcaactcgtcgcgaagaagctcggcctcggcacggtctcgcgcgcgcagatgcacgacatcgatacgaacgtgcagctcggcacctggtatctgtccgacatctaccagaagttcgacgattcggccgtgctcgcgacggccggctacaacgccggcccgggccggccggcccaatggcggcaggtgctcacgcgccccgtcgaaggcgcgatcttcgcggagacgatcccgttcaacgagacgcgcgaatacgtgaagaacgtgctgtccaacgagacgtactacgcggcgctcttcgagaagaagccgcaatcgctgaaggctcgcctcggcttcatcgcgccgtaa

SEQ ID NO: 1023 - DNA, 1077 bp, Burkholderia pseudomallei
atgaagtcatccttcagccgcgcgctgcaaaccactttcgcgtgcgccgccgtggcggcgctggccgccggcgcttcgggcgcgtgcgcgcaatcgagcgttcagctctacgggcaggtcgacgaatggatcggcgcgcagaaattccccggcgggcagcgcgcgtggggcgtgcagggcggcggaatgtcgacgtcgtactgggggctgcgcggcaccgaggatctcggcggcggctatcaggcgatcttcacgctcgaggatttcttccgcgcgcagaacggccattacggccgcttcgacggcgacacgttcttcggccgcaatgcgtatgtcggactcgcgacgccttacggcacggtgcgcgccgggcgcctgacgacgcagctgttcatctcgacgatcctcttcaacccgttcatcgattcgtatgtgttctcgccgatggtctaccacgtgttcctcggcctcggcacgttcccgacgtatacgaccgatcagggcgtcgtcggcgattcgggctggaacaacgcgatcgactacacgagcccgagcttcggcggcttgaacgcggccgcgatgtacgcgctcggcaacacggcgggcgacaaccgctcgaagaagtggagcggccagctgaactattcgagcggcccgttcgcggcgacggccgtctaccagtacgtgaacttcaacggcggcccgggcgatctcggcgcgctcgtgtccggcatgaagagccagggcgtcgcgcagctcgggctgtcgtacgacttcaagcttgcgaagatctacgcgcaatacatgtatacgaagaacgaactgaacacgggaagctggcacgtgaacactgcgcaaggcggcgtatcggtgccgctcgggccgggcagcgcgctcgcgtcgtatgcgtattcgcgcgattcgggcgggcacgaccagacgcgtcgcacgtgggcgctcggctacgattatccgctgtccaagcgcaccgacgtgtatgccgcgtacatgaacgaccgctattcgggcatgtcgggcggcgacacgttcggcgcgggaattcgtgcgaagttctaa

SEQ ID NO: 1024 - DNA, 1440 bp, Burkholderia pseudomallei
atgaagcgagtgagactggccgcgctccttggcgcgagcgtcttcgcggcggcgggctgcggcagcgacgagccgaagacgccgggcgcgtcggacaacggcgcgcaaacgggcgccgcgcgcaacgtcatcttctttctgggcgacggaatggggatgacgacgctcacggccgcgcgaatctatgcgctcggcgaggacggcgcgctcacgctcgacacgctgcccgagaccgcgttcgtgaagacctattcgaacgatgcgcaggtgacggacagcgcgccgtcgatgtccgcatatatgacgggcgtgaagacgaacaacgaagtgatctcgatgacacccgacacgaaggcgatcgagccgagcgcgagtctcaccggcaactgcggcgcgaacaacggcaagccggtgccgacgctgctcgagatcgcgaaggcgaaggggctcgccaccggcgtcgtgacgacgacccgcgtcacccacgcgacgcccgccgcgacctacgcgcacgtgtgccaccgcgacgccgagaacgacatcgccgcgcagctcgtgccgggcggcgcgggctacaacgcggcgctcggcggcggcgtggatgtcgtgctgggcggcggcgcgcaattcttcgtgccgaaggaagcgggcggcaagcgcgcggacggccgccatctcgtgaacgagctgaaggcgaaggactacgcgatcgcgcagaaccgcgacgagctcctcgccgccgatgcgacgaagagcggcaagctcgcgggcctgttcgcgtcgagccacatgagctacgacctcgaccgcggcgcgacgaaagagccgagcctcgccgacatggcgacgcgcgcgctcgacgtgctgcagaagaacccgaacggctatttcctgatggtcgaaggcgggcgcatcgatcacgcgctgcacgacacgaacgcgaagcgcgcgctgcaggatacggtcgcgttcgacaacgcgatcaaggcgacgctcgacaaggtgcgccagaccgatccggagttgaagaacacgctcgtcgtcgtgacggccgaccacgatcacacgctggtgctcaacggctacgcggcgcgcacgggcaagacggaagcgggcaagccgggcgtgctcggcgtgctgcgcaactatcagacgggcgcggtcgcgaaggacgcggacggcgcgccgtacacgatcatcggcttcggcaacggcgagaaccgcgtgcaaggcagccgcgcgggcacgagcctcaccgacgcggtgacgggcgcggacgattatcgccaggaagcggtcgtgcgcatggccaagggcggcgagacgcacggcggcaccgacgtgttcctcggcgcgatcggccgcggcgcggacggctttcacggcgtgatcgagaacaacaaggtgttcgagctcgtgcgcggcgcggcgcagctctga

SEQ ID NO: 1025 - DNA, 1404 bp, Burkholderia pseudomallei
atgtcgactatcaagcgcatcgcggcggcggcgttcgccgcggcggccctctcgggcggtttcggccacgcggcgcacgccgcgggccaggcgaagaacgtgatcttcttcctcggcgacgggatggggccggccaccgtgacggcgagccgcctctacaaggtcggcgaagccggccaactgacgatggaaaagctgccgcgcaccgcgcgcatcaagaccttctcgaacgacgcgcagacgacggacagcgcgccgtcgatggccgcgtacatgaccggcgtgaagatgaacaacgaggtgctgtcgatgtcgccggacacgcgcgcgatcgcccccggcagcgacgcgaacggcaacaagacggtgaaccgctgcggcgtgggcaacggcacgccggcggcgacgctgctcgagctcgcgaaggcgcgcggcaaggcggtcggcgcgatcacgacgaccgagctcacgcacgcgacgcccgcggcgacttactcgcacatctgccatcgcgacgcgcagtacgacattgccgcgcaggccgtgccgggcggcgcgggctacaacgcggcgctcggcgacggcgtcgacgtgctgatgggcggcggccgcaatcactggacgccgtacgatccgctcgccaacaggcgcggccgcgcggacgggcgcaacctgctcgccgagctgcaggcgaagggctacgcggtggtcgcgacgaaggatcagctcgcgcaggcgggcgcgggcaagctgatcggccttttcagcacgacgagccatctcgaatacgagctcgaccgcgtcgcgggcaagggcgagggcgcgacgcagccgagcctcgcggagatgaccgcgaaggcgatcgacgtgttgcggaagaatccgaacggctatttcctgatggtcgaaggcgggcgcatcgaccacgcgctgcacggcacgaacgcgaagcgcgcgctcgaagacacggtggcgttcgacgaggcgatccgcaccgcgctcgcgaaggtcgatctgtcggatacgctgatcgtcgtgacggccgatcacgatcacacgatgacgatcaacggctattcgaagcgcggcaatccggtgctcgacatcagccgcaactatcgcgacggccagccgaacaaggacgcggacggcaacccgtacacgacgctcgtgttcggcaatggcgcgaaccggccgaacgtgcgcgtgccggtggattcgtcgacggcgacgaacgacgcgtatctgcaggaagtcggcgtgcgcatgggcagcgcgggttccgagacgcacggcggcggcgacgtgatgctgtttgccgacggcgccggcgcgaaggcgttcaagggcacgctcgacaacacgaaggtgttcggcctcgtgaaggccgcgttcgggttctga

SEQ ID NO: 1026 - DNA, 651 bp, Burkholderia pseudomallei
atggactggacatgctgcgaattcaggcatctgagttcgaacgagctttacatgatccttcgcacgcgcaatgcagtcctcgtcgtcgaagacgcgcacacgcatctcgacatcgacggcaaggacgaattcgcgatccacgtgttcgccaccgacaagcgcggcgagcagccggcgatcgccgcttacgcgcgcctgctgcccggtgacgacatcgatcccgaaacgacgatcgacaagatcctgacgagcgccgcgcaccgcgacgatcgcacgatcgacgcgctgatcgagcacgtgctcgcggccgcgcacgcacgctggccggatgcgccggtgcgcgtgcaggcgcccgcgccgcgcgaaggcttctacaaccgcttcggcttccgcaaggtcgacgggccgtatctcgagcatggcgcgccgtacgtcggcatgctgcgcgcggcgagcgccccgtcgaaggccgtgcgcaatctgctcgatctcgtcggcaacgcgacgggcgccaatcccggcacgagcgcgggcgcggtgcccgcgagcgccgcgcgcaaaccgcgcaaggccaacgccgaatccaccaccgaaggcgaacgctatgcgttcgccggccgtttgccggccgactccggaatgaaccgatga

SEQ ID NO: 1027 - DNA, 780 bp, Burkholderia pseudomallei
atgcgcttcgtccgctccctgctgctgttcgtctatttcatcgtctatacggtgccgtacgccaccgcatgcttcatcgcgttcccgttcatgcggccgaacgcgcgctactggatggcggtcggctggtgcaaatcgacgctgttcgtcgcgcgctggctcacgggtatccggtaccgcgtcgaaggctacgagaacctgcccgacggcccggccgtgctgctgccgaagcatcagtccgcatgggagacgatcgcgctgcccgcgctgatgcccaagccgctctgctacgtgttcaagcgcgagctgctgtacgtgccgttcttcggctgggcgctcgggatgctgcacatggtccacatcaaccgcaaggacggcaagaacgcattcgattcggtgatccgccagggccgcaagcggatggcggaaggcgcgtgggtcatcatgttccccgaggggacgcgcacgccggtcggcagccagggcaagtacaagacgggcggcgcgcgcttcgcgatcggcgccggcgcgcccgtcgtgccgatcgcgcacaacgccgggcgcgtgtggccgcgcaactcgttcacgaagtaccccggcaccgtcacggtgtcgatcggccagccgatcgacacgcaaggcctcacccccgaccaattgaacgaacgcgtcgaaaactggatcgaagcggaaatgcgccgcatcgatccgcacgcgtaccggcacgagcgcgacggcgcacgcggcgccgcccgcgcgtccgacgccgcgcatccctga

SEQ ID NO: 1028 - DNA, 315 bp, Burkholderia pseudomallei
gtggctcgcggcagaatcatccccggcgcgtatgcgatttcggagaccacctccgctcgactgcgccaagaataccccggactcgaccattggagcatcagcgagtttcagctcgcctggggaaactacgcaagagaattgcgcggcgacgccggcatgacttttgatcgcgacgaggttttcctcgtatatctgcacatcgtgcgaaaagaccggacattcagcttcgctggcgaccgcggcatgccgggcacttgggaagcttacgcgcaagaaaaaccgtgggagacggatgcgccgttgccggtcatttaa

SEQ ID NO: 1029 - DNA, 519 bp, Burkholderia pseudomallei
ttgcgcgctcgcggtttcacgctgatcgaattgatgatcgtgctcgcgatcgtcggcgtcgtcgccgcgtacgcgattcccgcctatcaggattatctcgcgcgcagccgggtcggcgaggggctcgcgctcgccgcgtccgcgcggctcgcggttgccgagaacgcggcgagcggcaatggattctcgggcggctacgtgtcgccgcccgccacgcgcaacgtcgattcgatccgggtcgacgacgactccgggcagatcgtcgtcgcgttcacgacgcgcgtggcggcggcgggcgcgaatacgctcgtgctggtgccgtccgcgccggatcaggcggatacgccgacggcgcgtgtcgcgttgtcgaagggcgccgtccaggcgggggcgatcacgtgggaatgctttgccgacggcaaggcgtcgtcgtcgctgcccgcgccgggcgccggcccgctgccgaccgatgcgccgacgctggccggcaagctggcgccccccgagtgccgcgcgtga

SEQ ID NO: 1030 - DNA, 1263 bp, Burkholderia pseudomallei
atgcgcgtcgaacgggttccataccgcttaatcactgtcgcgacggctgccgttttcctggccgcgtgcggaaaaaaagaatcggctccgccccctcaaacgcccgaagtcggcgtcgtcaccgtccagccgcagcccgtgccggtcgtctccgaactgccgggccgtacgagcgcctatctggtcgcgcaggtgcgcgcacgggtcgacggcatcgtgttgcggcgcgagttcacggaaggcagcgacgtcaaggccggccagcgcctgtacaagatcgatccggcaccctatatcgcgcaattgaacagcgcgaaggcgacgctcgcgaaggcgcaggcgaacctcgcgacgcagaacgcgctcgtcgcgcgctacaaggtgctcgtcgccgcgaacgcggtcagcaagcagcagtacgacgatgcggtggccgcgcaagggcaggcggccgccgacgtgggcgcgggcaaggccgccgtcgagaccgcgcagatcaacctcggctatacggatgtcgtctcgccgatcacgggccgcgtcggcatctcgcaggtcacgccgggcgcgtacgtgcaggcgagccaggcgacgctgatgtcgaccgtccagcagctcgatccggtctacgtcgatctcacgcagtcgagcctcgacggcctgaagctgcgccaggacatccagagcgggcgcatcaagacggaaggcccgggcgcggcgaaggtcacgctgattctcgaggacggcaagccgtacccggagcggggcaagctgcagttcagcgatgtcacggtcgaccagacgacgggctcggtcacgatccgcgcgatcttcccgaacaagcagcgcgtgctgctgccgggcatgttcgtgcgcgcgcgcatcgaagagggcgtcaacgagaacgcgttcctcgttccgcagatcggcgtcacgcacgatccgaagggccaggcgatcgcgatgatcgtcgacggcaagggcaaggtcgagccgcgcgtgctggtcacgggcggcacgcagggccagaactgggtggtcgagagcggcctgcaggcgggcgaccgcgtgatcgtgcagggcatcgacaaggtgcgcccgggcatgaccgtgaaggccgccgaggctcaactgccggccgcggcggccggcgcgtcgggtgccgcgcccgcgggcggctcgcccgcccaggccgcggcggcgagcgcggccgcgtcgggtgccgcgccgtcgagcgctgccgccgcgtcgagcgcgcaataa

SEQ ID NO: 1031 - DNA, 1270 bp, Burkholderia pseudomallei
atggcactctcacgaggcactcgcactttgatcggtgcaacgctttgcgcatccgtgacgctgatgaccgccgcttgcggcggctccgacggctcgggcgcgcccggcgccagcattttcaagtcgccgcacggctcgggctcatcgagtaccacgggcacgagcggcaccaccacgagcggcaccggcggcacgagcaccggcagcacgcagaccacgatggcgctgcagatggcggacttcatcctcgctcagcaggacagcaatggcgcgattccggacgaagcgggcagcggcaccgccaatacggactccgatatggaatacgcgctgatcggccttgcggccgcgtacggcgcgacgcatgacgcgaagtacctgaacggtctcgagaagggcatcgcctggctcgccgcgcgcgaggagatgaccgatccggcctggaggggaagctggcgctatgtgtattcgatgacgccgccgtacgatccgatcccgacgtcgccgggcgccggcattgccgacgtgcgcggcgtggacgcgacgtccgcgctgttcgtctacctgctctatctcgaccggcaactgacgggcagcagcgcgctcgtcacgcaatacggcgccaatgcgcgcgcggcgctcgatttcgtgctcgcgaagaacatcaatccgagcggctactcgggcagctcgtggcaactgcccgtcggcagcaccacgtggcagttctggccgtacgagtacgcggcggatcagggcgatgtctatctcggcatgaacgggggcgcgctgctgtttccggacaatccgaactacgcggcgaaggcggctttcctgaggaacaacgtgccgtcgcagttctacatgacgggcgcgcagcgttattcggtcggccgcgatacgggagcgccgctcgattcggacctcggcatcgatacgatctttccgcagggctatctgccgtgggtgttcggcgcgaattcgcagagcatcggctcgatccagtggatgatcaaccagacggccgccgacggcagcatccgttcgccgtcgaccgaccccgcgtacgcgctgtccaacgtgatcctgctgctcggcgcgccgacccagggcatgcaggcgccgtcgacgacgctgccgtggatcgtgaacaacgtgctcgatccgcagacgtacggcatccacgactaccccggctcgccggaccaggagacgaacgtctccgggttcgcggtcgcggcgttgctcgggacgaaggcgttcccctgac

SEQ ID NO: 1032 - DNA, 981 bp, Burkholderia pseudomallei
atgagctccaccgatacgttgtccggccaggttgccgcggccgacgccgagatcctgctcgcccagccgcgcggcttctgcgcgggtgtcgaccgcgcgatcgagatcgtcgagcgtgcgattgcgatgcacggcgcgccgatctacgtgcgccacgagatcgtgcacaacaagtacgtcgtcgaggatctgaagaagaagggcgcgatttttgtcgaggaactcgaggaagtgccgtccggcaacacggtgatcttcagcgcgcacggcgtgtcgaaggcggtgcgcgacgaggcggccgtgcgtgggctgcgcatctacgatgcgacgtgcccgctcgtcacgaaagtgcacgtcgaggtcgcgaagatgcgccaggaaggcgtcgacatcgtgatgatcggccacaaggggcatccggaggtcgagggcacgatggggcaggtcgagcgcggcatgcacctcgtcgagagcgtcgaggacgtgcgccggctcgagctgcccgatcccgagcgcgtcgcgctcgtcacgcagacgacgctgtccgtcgacgacgcggccgagatcatcggcgcgttgaaggcgaagtttcccgcgatccgcgagccgaagaagcaggacatctgctacgcgacgcagaaccgccaggacgcggtgaagttcatggcgccgcagtgcgacgtcgtgatcgtcgtcggcagcccgaacagctcgaattcgagccgcctgcgcgaggtcgccgagaagcgcggcgtcgccgcctacatggtcgacgcgcccgagcagatcgatccggcctgggtcgccggcaagcgccggatcggcgtgaccgccggcgcgtccgcgcccgaggtgctcgcgcaggccgtgatcgcgcgcttgcgcgagctcggcgtgaccaacgtgcgggcgctcgagggcatcgaggagaacgtgtcgttcccattgccgcgtggcctgaatctgtcttccgccgcctga

SEQ ID NO: 1033 - DNA, 648 bp, Burkholderia pseudomallei
atgaataccaaaatcgcgacgcgcttgtccgttttcgctctcgccggcgccctgctggcgggttgcgcaacccagcaaggcaccaacacggctgtcggcaccggcacgggcgccgcgctcggcgcgggcatcggcgcgctcgctggcggcggcaagggcgcggcgatcggcgccggcgtcggcgcgctcgtcggcggcgtgacgggttacaactggcaagcgatcaagaacaagctcgcgccgtcggcgcagcaaacgggcacgcaggtcaccgaacagccggacggctcgctcaagctgaacgtgcccagctcggtcacgttcgcgaccgaccagtacgcgatcacgccggcgttcacgccgctgctgaacgacctcgcgacgacgctgaaccagaacccgcagatcaccgcgtcggtcgtcggctacaccgacagcacgggctcggccgcgcacaatcaaacgctgtcgcaaaatcgcgcgcaaagcgtcgtgaacgcgctcgcgcagcgcggcgtcgcggcgaaccgcctgtccgcgcaaggcatgggcgcgtcgaacccgatcgccgacaacgcaacggaagccggccgcgcgcaaaaccgccgcgtcgagatctacctgcgcgcgccgcaagcggcgcagtaa

SEQ ID NO: 1034 - DNA, 528 bp, Burkholderia pseudomallei
atgagcttcagcaatgttccggccggcaaggatctgccgcaagacttcaacgtgatcatcgagatcccggcgcaaagcgagccggtcaagtacgaagccgacaaggcgctcggcctcctcgtcgtcgaccgcttcatcggcaccggcatgcgctacccggtgaactacggcttcatcccgcagacgctgtcgggcgacggcgaccccgtcgacgtgctcgtcatcacgccgtttccgctgctcgcgggctcggtcgtgcgtgcgcgcgcgctcggcatgctgaagatgaccgacgaatcgggcgtcgacgcgaagctcgtcgcggtgccgcacgacaaggtctgcccgatgacggccaacctcaagtcgatcgacgacgtgcccgcgtacctgaaggatcagatcaagcacttcttcgagcaatacaaggcgctcgagaagggcaagtgggtgaaggtcgagggctgggacggcatcgacgccgcgcacaaggaaatcaccgacggcgtcgcgaacttcaagaagtaa

SEQ ID NO: 1035 - DNA, 381 bp, Burkholderia pseudomallei
atgagccctgacaccgcccgccgattcgataccgaattcgcgccgcgcatcgcgcgcgccatcgccgatttgctgaaccatcgggcgcacaccgacgtcgtcggctacggcggccacggccatccgacgcaggtgcggatcgtcgcgccgcacgccgagcacgtgcgcggctacgcacacccgctgaacctcgcgctcacgtggaacaccgacgagatcgaacgcctgatggaagcggacggcgccgcacgcttcgagcgctatctggcggcgctgccgcgcaagctggcggcatgggaaaacgcgcgcggcgtcgatttcggctcgcgcacgcaggccgacgcgctcgtactactcggcgggctcgatttcgaggcatga

SEQ ID NO: 1036 - DNA, 1236 bp, Burkholderia pseudomallei
atgacccgacgcgctcacgcgccttcgccgttcgctttcccgctcaggctgagccactggatgaaaggtttcgcgctcgcgctgccgcttttcggcaatcccgccttcgcgcaggacgcaagcgccggccccgcgggcggcgtgtacaacctgctcgtcggcacctacacgggctcgggcagcgacggcctctacgtgtatcgcttcgataccgactcgggccgggtgagccccgtgtcgtcggcgaaggccgagaacccgtcgtacctcgtcgcgagccgcgacggccgccacgtgtatgcggtcaacgaactgccgggtgacgcgggcccggcgagcgtgcgcggcggcgtcagcgcgttcgatttcgacgcgaagacgggcgcgctcaagttcgtcaaccgcgtatcggcgcaagggaacgatccgtgttacctgagcctgtcgccggacgggcggtatctcgtcgtggcgaattactcggtcgcgtccgatccgggcggcagcttctcggtgttcccggtcgaggcgacgggcgcgctcggcgccgcggtgctgaacgtgcatcacgagggcacgggcccggtgaaggggcggcaggacggcgcgcacgtccattcgaccgtgttctcgccggacggcaagtacctgttcgtgcaggatctcggcgcggacaagctctattcgtaccgctacacgccggacggcagccgcggcctcatcggcccgaccgagtcgcgctacacgctcgcgaaggcgggctcgggcccgcgccatctggtgttcggcgcaaatgggcggttcgcgtacgtgaccaacgagctgaacgcgtcggtcgacgtgtatcgctacgacgacggccggctcgcgcacgtcgagaccgtgccgatgacggcgccgggcttcgcgggcaaggtgggcggcggcgcgctgcatctgtcgccggacgggcgcttcctgtacgcgaccaatcgcggcgacgcgaacgacatcgtgatctacgcggtgaacgcggccgacggcaagctgacgctcgtcggccggcagtcgagcctcggcaagacgccgcgcgagttcgcgatcgacccgagcggcaagtggctcatcgtcggcaaccaggacagcgacagcgtgttcgtgttccggcgcgacatcgcgagcggccggctcgagccgaatccggcgcggatcaggatcgacaagccggtcgatttcaaattcgtgccggtgcagtga

SEQ ID NO: 1037 - DNA, 2142 bp, Burkholderia pseudomallei
atgtctctgttcaataaaatcgtgaaggaattccagtggggccagcacaaggtgcgcctcgaaaccggtgaaatcgcgcgccaggcaagcggcgccgtgatcgtcgacatcgaggacaccgtcgtgctcgcgaccgtcgtcggcgcgaagtcggcgaagccgggccaggatttcttcccgctcaccgtcgactacatcgagaagacctactcggccggcaagatcccgggcggcttcttccgccgcgaaggccgtccgtcggagcacgaaacgctgacgtcgcgcctcatcgaccgcccgctgcgcccgctcttccccgaaggcttctataacgaagtgcaggtcgtgatccacgtgctgtccgtgaatccggagattccggcggacatcccggcactcatcggcgcatcggctgcgctcgccgtgtccggtctgccgttcaacggcccggtcggcgccgcgcgcgtcgcgtacgtgaacaacgaatatgtgctgaatccgacgcgtgagcagatcaaggcgtcgcgcctcgatctcgtcgtcgcgggcacggagcgtgcagtgctgatggtcgagtcggaagccgaccaactgccggaggacgtgatgctcggcgcggtggtgttcggccacgagcagatgcaaacggcgatcgacgcgatccacgagctcgtgcgcgaaggcggcaagcccgagtgggactggcagccggcgccgaaggacgaggcgctgaacgcgcgcgtgaccgaactcgcgcagccggagttgctcgccgcctaccagatccgcgacaagcaggcgcgctcgacgaagctgaaggaagtgtacgcggcgacgtcggcgaagctggaggaagaagcggtggcggccggcacggtcgcggcggacaaggcgaccgtcggcaacatcctgttcgacctcgaggcgaagatcgttcgcggccagatcctgaacggcgagccgcgcatcgacggccgcgacacgcgcacggtgcgcccgatcgaaatccgcacgggcgtgctgccgcgcacccacggctcggcgctgttcacgcgcggcgagacgcaggcgctcgtcgtcgcgacgctcggcacgaagggtgacgaacagatcatcgacgcgctcgaaggcgaataccgcgagcgcttcatgctccactacaacatgcccccgttcgcgaccggcgaaacgggccgcgtcggctcgccgaagcgccgtgagatcggccacggccggctcgcgaagcgcgcgctcgtcgcgtgcctgccgagcgccgacgaattcggctactcgattcgcgtcgtgtcggaaatcaccgaatcgaacggctcgtcgtcgatggcgtcggtgtgcggcggctgtctcgcgctgatggacgccggcgtgccgatgaaggcgcacgtcgcgggcatcgcgatgggcctgatcctcgagggcaacaagttcgcggtgctgaccgatatcctcggcgacgaggaccacctcggcgacatggacttcaaggtggccggcacggcggacggcgtgaccgcgctgcagatggacatcaagatccagggcatcacgaaggaaatcatgcaggtcgcgctcgcgcaggcgaaggaaggccgcatgcacatcctcggcaagatgaaggacgcggtcgcgggcgcgaacacgcaactgtccgaattcgcgccgcgcatgatcacgatcaagatcaacccggaaaagattcgcgacgtgatcggcaagggcggctcggtgatccgcgcgctgaccgaagaaaccggcacgacgatcgacatctcggatgacggcgtcgtgacgatcgcgagcacgaacagcgaagggatggccgaggcgaagaagcgcatcgagaacatcacggccgagatcgaagtcggccacgtgtacgaaggcacggtgctcaagctgctcgatttcggcgcgatcgtgaacctgctgccgggcaaggacggcctgctgcacatctcggaaatcgtcaacgagcgcgtgaaggacatcaacgactacctgaaggaaggccagcaggtgaaggtcaaggtgatccagacggacgagaaggggcgcgtgcgtctgtcggcgaaggcgctgctgaacgaggcggccgcccaggcggatacgccgccgcagcagtaa

SEQ ID NO: 1038 - DNA, 996 bp, Burkholderia pseudomallei
ttgcgttgctgtttgccccgccgtttgcccttgacgatgccgctgaatccgaagatcgcgcaggtgctcgacatgatcgagcgcgccaagcgtcccgattatcatgaacagacgcccgcgcaggcgcgcgccgcgtacgagaagagcgcgccgatcctcgacgtcgcgcccgcgccgatgttttcggtcgaagacctgcgcgtgccgtcgcgcgacggcggcgcgttcggcgcgcggctctatctgcccgtcgagccgagtctcgccgagccgctgcccgtgctcgtctactaccacggcggcggcttcacggtcggcagcgtgaacacgcacgacgcgctgtgccggatgttcgcgcgcgatgcgcagtgcgcggtactgtcggtggattaccggctcgcgccggagcacaagttcccgaccgccgtcgacgacgcggaggacgcgctcgtgtggctgcatgcgcacgcgtcgcgcttcggaatcgattcggcgcggctcgcggtgggcggcgacagcgcgggcggcacgcttgcgacggtgtgcgcggtgctcgcgcgcgatcgcgggatcgcgctcgcgctgcaactgctgatctatccgggcacggtggggcatcagcagaccgaatcgcacgcgcggctcgcgaaaggctatctgttgtccgcggacacgatccagtggtttttcgggcattacgtgcgcgatgcgtcggatcgcgacgactggcgcttcgcgccgctcgacggcacgcgcggcgcgccgtcgttcgagcgcgtcgcgcccgcgtggatcgcgacggcgcagtacgatccgctatccgacgaaggcgaagcgtatgcggacaagctgcgcgcggcgggcaaccgcgtgacgctcgtcgcgtacgcggggatgattcacgagttcttcaagatgggcggctacgtgccggaggtgcggctcgcgcatgcggacgcggtgggcgcgctgcgcgcggcgttcgacggcgattga

SEQ ID NO: 1039 - DNA, 588 bp, Burkholderia pseudomallei
atgcacaaacgcaatctcgtgttgaaagccgccgccgcgctcgtcgtgggcagcctggcgctcgccggttgcacgacgacgccggacaagcccgccaatgccgcgaccaacgcgtcgaagcgtcaagccatcgatgcgagcgtcgacgcgacgctgtcgcgcctgtactcgacggtgcgcggctcgcgcgaactcgtcgcgaagtcgcgcggcgtgctcgtgttcccggacgtgatccaggcaggcctcatcatcggcggccagaccggcaacggcgcactgcgcgtcggcggcgctacggtcggctactacaacacgtcgtcgctgtcggtcggcctgcaggcgggcgcgcagtcgaaggcgatcgtgttcctgttcatgacgcaggacgcgctcgacaaattccgcaactccgacggctgggcggcaggcgccgacgcatcggtcgcgctcgtgaagatgggcgcgaacggcgcgatcgacacgacgacggcgaccgcccccgtcgaagtgatcgtgctgacgaacgccggcctgatgggcgacgtgtcgatcagcggcacgaaggtcacgaagctgaagatctga

SEQ ID NO: 1040 - DNA, 1146 bp, Burkholderia pseudomallei
atgaatctgctgaaacgttacgctgcacccgttgcctgcgcggcggccgtcctggttttcgcggcctgttcgtcaacgaaggacgcgcgccgcgtgccgacgccgctcaccgagttcaaacccgtgctcgacgtgcagcaggtgtggacggcgagcgtcggcaagggcggccgctactcgttctcgcccgtcgcggtgggcgacgccgtgtatgtcgccggcgcgaacggttcggtcgagaagatcgacgcgaagacgggccagcaagtctggcgtacgaagatcggctcggacttgtcggcgggcgtcggcagcgacggcaacctgaccgcggtcggcgcgctgaagggcggcgtgttcgtgctcggcccggacggcaagcagttgtggaaagccaccgtgcaaggcgagatcttctcgccgccgctcgtcggcaacggtctcgtgatcgtgcgcacgatcgacggccaggtgatcgcgttcgccgcgcagacgggcgagcagaagtggacttaccgcaaccgcgcggtgccgctgaacctgcgcgtgtcggccggcatgacgttcgcgggcgacgccgcggtgctcgcgggcttcccgggcggcggcctcgtcgcgctgaacctgcagacgggcgagccgttctggcagacgcccgtgtcgtttccgaaaggcgtgaccgaagtcgagcggatcaacgacgtgacgggcgcgccgacgctcgtcggcgccgagacgtgcgcggtgacgttccaggggcagctcggctgcttcgatgcgaactcgggccgcccgttgtgggaaaagccgttttcgagccgcagcggcgtcgcgcaggacgatacggtcgtcgtgggcggcgacgactggtcggtcgtgtcggcttacgacgtcgcgacgggcaaggcgctctggcgcaacgacaagctgaagagccgcgacgtcggcgtgccgtacctgctcggccgcgcggtcgtgctcggcgactacaagggcttcgtgcatttcctgtcgcgcgatgacggcacgttcgtcgcccggatgaagacggacggcagcgcgatcgccgccgcgcccgtgcttgccggcaacacgctcgtcgtcctgacgcaggacggcggcgtatacggtttccgtccgcgctaa

SEQ ID NO: 1041 - DNA, 636 bp, Burkholderia pseudomallei
atgcccaactcactcgaagctcagattcgccaggccatgaaaaccggcagcaccctcacgatcgaattcgatcaggcgctcaaccagaaatcgcccggcaccttgaatgtctttcttcatccggccaatggcggcgtcaggatcgatctcgattcgggcaatcaaggcgaacccgcgaaaatactgtggctgccgtggaagcaaggcgaactgcaaacgttgcaacccggctcgatctcgaccgtggacatgctgttcttcacctactacctgagcggctgcaaggtattcgccggcgatggggggccggtctggcacatcgacgcgccggtcgaagccaatcagttctggcgccgcatgtcgagcgacgaatggatggaggactgggaagtcggcaccgatcgtcaggtggcgtacctgcatcgcgcgggccaaagcgacagcctgtggaatctgtccgcgtatctcgaaggcgctgcgccgagcacgtatggacgcgacaatctggggcaggccgtggtgggcgggatcgtcaccggtcggcagcaaatgagcctgtaccagtacgcgacgacgtcttcgggctcgtccgcctggagcccattgacatacaccctccagcagcgcaagcaatag

SEQ ID NO: 1042 - DNA, 372 bp, Burkholderia pseudomallei
atgaacgaagcacgcgccgcccgcgcccagggcgcacccggctcgcgccgatgtgggccggacggtcggtccgtagccaggccagtactggcgattgtcgttgccgcgtcggtcgtctcgccggcgatcgccatcgcgccggtcgccgtagccgccgcgatcgtcgcgccgatcgtatggcggcgcatgcgtgcgctcccattcgtcgcgctcccagtagcggtggccgtcccaatagcgatcgccgtgtcagccgatgcggacgtccacgccgacggcgggctccgtcggatacaccgcgccccccgcgagcatcgcgctcgcgaggagcggcggaatgatcagtcctttcattgtcggccgcccctgtga

SEQ ID NO: 1043 - DNA, 1251 bp, Burkholderia pseudomallei
atgccgatcccccacgccctcgcgacgctcgccgcggccgcgctgctgatgcacgccgcgtgcgcggcgacgcttgccgtccacccgggcgagcgcatcggcgcggcgctcgccgccgcgcggccgggcgacacggtgctcgtccagcacggccgctacgaggagaacctgagaatcgacaagccgctcacgctgcgcggcgtcggccgcccgacgatcgacgggcgcctcgcgggcgacgtgatccgcgtcgccgcgccggacgtgacgatcagcggcttttcgatcgtcgacagcggcgcgagcctcaccgcgcaaaacgcgggcgtctacgtggcgcccggctccgatcgcgcgcgaatcgagcgctgcgagctcgtctacaacctgttcggtctctggatcgagcgctcggccgacgtgcgcgtcaccggcaacgtgatcgtcggcaagcgcgatttgctgtcgcccaggcgcggcaacggcatccagctctacaacacgacgggcgcgcgcatcgccggcaacacgatcagctacacgcgcgacggcatctatgtcgacgtgtcgcatcacgcgcgcttcgagcacaacacgatccacgacgtgcgctacggcacgcattacatgaactcgtactacaacgtctgggacggcaacgacgtctatcacaaccgcggcggcctcgcgatcatggaggcgcgcgaccagatcgtgcgcggcaaccgggtatggggcaacaccgatcacggcatcatgctgcgcacgatccaggattcgctgatcgagaacaacgtcgtcgccggcaaccagcgcggcctgttcatctacgacgccgaatacaacacgatccgcggcaacctcgtcgtcgacaacaagatcggcgtgcatctgtggggcggctcgatccacaacgacgtgacgggcaacgatttcgcggacaaccgcgagcagatccgctacgtcgcggcgagcgacgtcgcgtggcccggcaactactggagcaactacctcggctgggaccggcgcggccgcggcgtcggcgacgtgccgtacaaggcgaacgatctcgtcgaccggctgacctggcgcgtgccgtcggtcaaggtgctgatgaacagtccggccgtgcaggcgctgcgcgtcgtcgcgcggcagtttccgctgctcgcggtgccgagcgtcgtcgacgacgcgccgcgcatgcgcgccgtgcacgccggctggccgcaatgggtgggcaagcgatga

SEQ ID NO: 1044 - DNA, 531 bp, Burkholderia pseudomallei
atgaaagcaaaaggaatgcaatacggtctgacggccgttctgctgtcgatgctctcaggcggcgcggcttattcgcagaccgcgacgaccggcaccatcaatttcaccggcagcatcaccgacgtgccgtgcgaaatcgacacggccgccacgagtagtaacgtgacgatggccaaggttttcgcgaacgacttcagcggcgtggggtcgaccaccggcacgacggcattcaagatcgtcctcaagaattgcggcgcgtcgacgagcggcgcgacggtgcgcttcatgggcacgactgacagcgccaatcccgcggcgctccagacgaccgcgggcggagcgggaggggtcgcgttgcagctcgtcgacgacaccggcacgccgatcagtatcggctcgagcagcaaggcatacacgattgccgagggcgacaacacgttcaatttcgcggcgcgctatatcgcgacgtccgcgaccgtgacgggcggcgcggccaatgccacggcggtattcgcgctgacgtacaagtag

SEQ ID NO: 1045 - DNA, 3375 bp, Burkholderia pseudomallei
atgaacaggattttcaaatcgatctggtgcgaacagacgcgtacgtgggttgcggcatcggagcatgccgtagcgcgcggtggccgcgcgtcgagcgtcgtcgcgtccgccggcggattggagaaagtgctcaagctgtcgattctgggcgcggcatcgctgattgcgatgggcgtggtcggaccgtttgccgaggaggcaatggcggcgaataacgccggtgtgtgtttgacgtacaacggtagtagcaacaatacatcaggtactggcggctggttcgctgatggttgtaaatcggccggctgggtgcagggcatggttacgaatagcaagacggattgggtcgggctgaccgcggacgacacgcagatcgtgctcgacggtagcgcgggcagcatttacttccggacgggcggcataaacggcaacgtgttgacgatgtcgaacgcgaccggcggcgtattgctcagcggcctcgcggccggcgtcaatccgaccgatgcggtcaacatgtcccagttgacctcattgtcgacgtcgacggcaaccggcatcacctcgctttcgacgtcgacggcaaccagcatcgcttcgctttcgacgagcatgctgtcgctcggcgtgggcgtcgtgacgcaagacgcctcgaccggcgcgatcagcgtcggcgccaattcgccgggcctgacggtggatttcgcggggggccagggcccgcgcacgctgacgggcgtcgccgcgggcgtcaacgctacggacgcggtcaatgtcggccagttggcgtcgctgtcgacgagcacggcagcggggctttccactgccgcgagcggcgtcgcgtcgctgtcgacgtcgctgctcggcgcggtgggcgatctggcgtcactgtcgacgagcgcatcgacggggctcgccactgcggatagcggcatcgcgtcgttgtccacgtcgctgctcggcaccgcggacaacgtgacgtcgctgtcgacgagcctcagcacggtcaacgcgaatctggccggcctgcagacctcggtggacaacgtcgtgtcatacgacgatccgtcgaagtcggcgatcaccctcggcggtgcgggcgtcacgacgcccgtcctgctgacgaacgtggctgcggggaagatcgccgcgaccagcacggacgcggtgaacggttcgcagctttacacgctccagcaggagttctcgcagcagtacgatctgctgacgtcgcaagtctcgtcgctcagcacctcggtgtcgggtctccaaggcagcgtctcggcaaatacgggaaccgcgtcgggtgacaacagcacggcgagcggtgacaacgcgaccgcgtcgggcacgaacagcacggccaacgggacgaactcgaccgcgtcgggtgataacagcacggcaagcgggacgaatgcgtcggcgagcggcgagaacagcacggcgacgggtacggactcgaccgcatcgggcagcaacagcacggccaacggcacgaactcgaccgcgtcgggcgataacagcacggcgagcgggacgaacgcatcggcgacgggtgagaacagcacggcgacgggtacggactcgaccgcatcgggcagcaacagcacggccaacgggacgaactcgaccgcgtcgggcgataacagcacggcgagcgggacgaatgcgtcggcgagcggcgagaacagcacggcgacgggtacggactcgaccgcatcgggcagcaacagcacagccaacgggacgaactcgactgcgtcgggcgataacagcacggcgagcgggacgaacgcatcggcgacgggtgagaacagcacggcgacgggcacggattcgaccgcatcgggcagcaacagcacggccaacggcacgaactcgaccgcgtcgggcgataacagcacggcgagcggcacgaatgcatcggcgacgggtgataacagcacggcgagcggcacgaacgcatcggcgaccggtgagaacagcacggcgacaggcacggattcgaccgcatcgggcagcaacagcacagccaacggcacgaactcgaccgcgtcgggcgataacagcacggcgagcggcacgaacgcatcagcgaccggtgagaacagcacggcgacgggtacggactcgaccgcatcgggcagcaacagcacggccaacggggcgaactcgaccgcatcgggcgataacagcacggcgagcggcacgaacgcatcggcgacgggcgagaacagcacggcgacaggcacggattcgaccgcatcgggcagcaacagcacggccaacggaacgaactcgactgcgtcgggcaacaacagcacggcgagcgggacgaacgcgtcggcgacgggtgaaaacagcacggcgacgggtacggactcggccgcatccggtacgaatagcacggccaacggcacgaactcgaccgcgtcgggcgataacagcacggcgagcgggacgaatgcgtcggcgaccggtgagaacagcacggcgacgggtacggcttcgaccgcgtcgggcagcaacagcacggccaacggtgcgaactcgacggcatccggcgcgggggcgacggcaacgggtgaaaacgccgcagccacgggcgcgggcgcgacggcgaccggcaacaacgcatcggcatcgggcacgagcagcacggccggcggtgcgaatgcaatcgcgtcgggcgagaacagcacggccaacggcgcgaactcgaccgcatccggcaacggcagctcggcgttcggcgagagcgcggcggcagccggcgacggcagcacggcgctgggttcaaacgctgtcgcgtcgggtgtcggcagcgtcgcgacgggcgcgggttcggtcgcgtccggcgcgaacagttcggcgtacggtacgggctcgaacgcgacgggcgcgggcagcgtcgccatcggtcagggcgcgacggcctcgggatcgaactcggtcgcgcttggcaccggttctgtcgcgtcggaggacaacacggtatcggtcggctccgcaggcagcgagcgcaggatcaccaacgtcgccgccggcgtcaatgccaccgacgccgtcaacgtcggccagttgaacagcgccgtgtcgggcatccggaatcagatggacggcatgcaaggccagatcgatacgcttgcacgcgatgcgtattccggtatcgcggccgcgaccgcgttgacgatgattccggacgtggatccgggcaagacgctggccgtgggcatcggcacggccaatttcaagggctaccaagcctccgcgctcggcgcgaccgcacgtatcacccagaacctcaaggtgaagacgggcgtgagctacagcggcagcaactacgtgtggggcgcgggcatgtcgtatcaatggtaa

SEQ ID NO: 1046 - DNA, 9690 bp, Burkholderia pseudomallei
atgaatacgaagatgttgctgataagagccggtaaggttacgcccacgacactgaagacactcgccgtcgcaggagtggatagcggcgatgagatcgtgttttccagcttgccggccaattcggagttgaagcgcgacggcgcggatcttgtggtgcgcacgcccgacgagacgttcgtgctcaaggatgcggcggcgaagctggccgatgagagcgtggtggtgcgattgggcgaacagccgcttgtcgtcacgcaggcacccaatgaaaacactcatttgccggcgggcgtccaattggcaggcttggccgcgcccggccagaacagtgcgttcgggctgcaatcgttcgtgagcgccgccggcgagcagtcactgcagagcgatacggtgtcaccggtcgccatgggcgcggtgacgacatcgggcatcaaggacgcgggcctgagcgacggcgggctaatgggcaacctgcgaacggacgtgcggccgacggacgagatacccatgtatcagcagaagctgacgcagttgccgctcgatccgcgtatcgatgtgccgagccgcaccgacttcggcgtcaacgccgcgcgctatgagccggcaccggcggcggtgactgcgccgaatttcgtcatgtcgccgggggacaaggatccgggcgcgggcgtgttgcagaatgtcacgaatccgcaacttgacggcagcggtccggccaacgcggtcgtgaccgcgtacgaggttgcgtcggatggccatttgatctcgctcggcaccgcgacctcggacggtacggggaattttgcgatcacgcctaatacgccgctggcggacggtacgcacgacatcgtgttccaggcgcaaaaaggcgacctgacgagcccgttttccgcgccgaccagcgtcgtgatcgacacgaagatcaacacgccgacgatcggtcttcccgcgtcgtcggacagcttcggcgccggcacggtcggcacgaaccatgacgacatcaccaatgtcacgaacccgacgttgacgggcacggccgaagcgggagcgacggtatatgtgtccgacgggagcggccataccgtctcgacgattgccgacagtaacggcaactattcggttcaggcgccgggcacgctcgccgagggcaacaacgtcttcaccgtgcaggcggtggacaaggccggcaatacgagcggcaccgcacagcagaacgtgacgctcgacacggtggccgcgactctgccggcaccgcagttggaccacggctcggataccggcgcgtccaatagtgacggcatcacgcgcgccacccagccggtgttgacgggcggcggcgcggaaccgaatgcattggtgacggtatacgccgacggggtgtccatcggtcaggcgacggcggactcgctcggccattacacgatccactccggggtactggccgatggcacgcaccagatcacggctcgccagatcgacatcgccggcaacacgtcggcgttgagtggcgcggcgctcgtgacgatcgacacgagcgagccggcgccggcgaacctgaaactggtggacgatacgttcggtctgcatacagccggtacgccgagcgacggcctgaccaaggacagccgggtcacgatcagcgggacggcgagcgcgggtgacgtggtgacgctgatggacggcgcgacgtcggtggggcaggtcacggccgacgcaagcggcaactggacgatccagaccgcgtcgcttgccgacggcacgcatagcctgacggcgagcgcggtcgatctggcaggcaacacgagcccggcgtcgagcacgctgccggtgaccgtggatacgatcaacccgccgcctgcgctgacgctgtcgccgttgtcggacacgttcggctcgggcacatcgggcacgaaccatgacaacatcacgtcggcgacgctgccgacgttcaacggcacggcggcagcgggctcgtacgtgcagttgtatgacgtgacgggcggcacgaccgtgtcggtgggttcggcggtggcggacagcagcggcggttggacgacgacgttgacgagcccgctgtcgggttcggcgagcggcgtatcgcacacgttggtggcggtgggggtggaccctgcgggcaatacctcgacggtatccggtccggacgtggtggtgatcgacaatgcggcggccgtgctgcccggaccgacgatggcatccgcatcggatacgggcgcgtccagcagcgacggcatcaccagcaacacggccccggtgtttacgggcacgggcgcggaagcgggcgcgctggtgacgatctatgcgaatggcacgtcggtgggccatgcgacggccgacgccagcgggaactatacgattcagtccaacgcgctcggcgcggacggacggtatcagatcacggcgcagcaggtcgatatcgcgggcaatacgtcgccctcgagtagcgtgactgcgatgacgctggatacgagcgaaccggcgcccgtcaatctgcatctggtggacgacacgttcggccagggcacggccgggacatccagcgacaatctgaccaaggacagccgggtcacgatcagcgggacggcgagcgcaggcgacgtggtgacgctgatggacggcgcgacgtcggtggggcaagtcacggccgacgcaagcggcaactggacgatccagaccgcgtcgcttgccgacggcacgcatagcctgacggcgagcgcggtcgatctggcaggcaacacgagcccggcgtcgagcacgctgccggtgaccgtggatacgatcaacccgccgccagcgctgacgctgtcgccgttgtcggacacgttcggctcgggcacatcgggcacgaaccatgacaacatcacgtcggcgacgctgccgacgttcaacggcacggcggcagcgggctcgtacgtgcagttgtatgacgtgacgggcggcacgaccgtgtcgatgggttcggcggtggcggacagcagcggcggttggacgacgacgttgacgagcccgctgtcgggttcggcgagcggcgtatcgcacacgctggtggcggtgggggtggaccccgcgggcaatacctcgacggtatccggtccggacgtggtggtgatcgacaatgcggcggccgcgctgcccggcccgacgatggcatccgcatcggatacgggtgcgtccagcagcgacggcatcaccagcaacacggccccggtgtttacgggcacgggcgcggaagcgggcgcgctggtgacgatctatgcgaatggcacgtcggtgggccatgcgacggccgacgccagcgggaactatacgattcagtccaacgcgctcggcgcggacggacggtatcagatcacggcgcagcaggtcgatatcgcgggcaatacgtcgccctcgagcagcgtgactgcgatgacgctggatacgagcgaaccggcgcccgtcaatctgcatctggtggacgacacgttcggccagggcacggccgggacatccagcgacaatctgaccaaggacagccgggtcacgatcagcgggacggcgagcgcaggcgacgtggtgacgctgatggacggcgcgacgtcggtggggcaggtcacggccgacgcaagcggcaactggacgatccagaccgcgtcgcttgccgacggcacgcatagcctgacggcgagcgcggtcgatctggcaggcaacacgagcccggcgtcgagcacgctgccggtgcgggtcgacactacgacgacgctcccttcgctgacgctgtcatcgtcgtccgatacgttcggcgccggcacgtccggcacaaaccatgacaacatcacgtcggcgacgcagccgaccatcaacggcacggcagaggcgggctcgtacgtgcagctgtatgacgtgacgggcggcacgaccgtgtcggtgggtgaagcggtggccggcagcaatggcacgtggacgacgcaactggtgagcccgctgtcgggttcggcgagcggcgtatcgcacacgctggtggcggtgggggtggaccccgcggggaacacctcggcggtatccggtccggatgtgcttgtgatcgacacgtcgacgccatcgccgagcacgccggcgttgacgcctgctgatcagttcaacggcaatccgtcgacgacgctcaatgccagaccgacgctgactggcacggcagaggcaggcgcgagtgtcagcctgaccgatagcggcgtggtggtgggggtcggcgttgcggattcgaccggccattggacgatccagacgagtgcgctgtttgcgggcgggcacaccatcacggccacagccgtcgatatcgccgggaacagcaacgtctcgggttcgagcacgatcgcggtggctgcgaacgtcccgacgccgcctgcgccggtgctgatcacgccggatgatacgtcgccgatcgacagcaccaacaacgacgatctgacgcgcgtcaccatgccgcatttcacgggcacgacgaatcagggctatttagtgaccctgttcgtcgacggcgtgtccgtcgggcagggcgtagccggtggcaacggaagctggacgatccaggacggcacgtcgctggctgacggcgcgcaccaggtgacggtgcgcgtcagcgatccgttgacgggcgcgacaagcgcgatgggccccgggacgacggtgacgatcgacaccacgccgccggctgcgcccgtcgtgcagctcgcttcgtattcggacagcttcggtggcgggacgaccggcaccaacagcgaccacctgaccaacgtcacgcagccggtgctgaccggcacggccgacccaaacaccgtcgaattgctgctagaagggaccgtgacccttggcacggcgaccacgaatgcgtcgggtgcatggagcttcacgatccagaatccgctcgcggacggcacgcatacgttcgcggtcacgtcctacgaccaggccaacaaccattccgccgccaccaacctcgtcgtgacggtggacaccgtggcgcccgcggggacgacgccgaccctggacccgacgtccgattcgttctcgccgatcaacggcatcggcaataaccacgacaacatcaccaacaatctgtcaccggtcttcaccggggtgaaccaggttgcaggcggcgaggtgctgctctatgacaacgggcaactgatcggatcggccacgtcgctgggtgcggtgggaacgacctggacggtcagtcccggcaacctgtatccgggaacgcacttcatccagtcacgctatatcgaccccgccggcaataccggagcgttgtcgtcgggcgtgagcgtgaccatcgacaacagcgagcccgcgccgaccaatctgaacctgccggcgtcggcggactcggggcaaagcaataccgaccacatcaccaacgtgaccatgccgcccatcacggggaacgccaattaccaggatgtggtggttctgacggccgtcaacggcacgaccaccacgacggtaggcaccgcgacggtcggcgcgtcgggaagctggtcgatcgtgccgggctcgctcgcggacggcacgtatacgttctcggcggtggccgtggacgtggcaggcaataccagcaacccgggcgtgccggtccaggtggtggtcgatacgcacgcggcggcgccgtcgatcacgctgggtacgccgtacgatacgttcggcacgggcacgagcggcaccaactcggatgagttgaccaggaacaccatcccatacatgtacggcgtcgcagaaccgggcgcgcgcgtgaccgtcgtcgagaatggcaacaccatcggcacggtcaacgcggactcgagcacgggttcgtattcgatccagataccgccggcgacggtggacggcacctatacgttccaggcgatgcaggtcgacgtggcgggcaatacctcggcgtatagcgcgccgaactacgtgaccatcgataccgtggcggcgacgccgacgctgaccgcgctcacgcccgcatcggatacgttcggcgtgggcacggcgggcaataaccacgataacctgaccaacgcgtcgaccatcggcatcatgggcacggccgcggaagccggtgcggcgcttgatctataccagatcacggtgtcgggttccatcacgacgtcgacgtcggtcgcgcataccacggcgggcgcgggcggctcgtataccttcgcgtctttcacggcacctggggccgacggcgtctatacgtatgagacccgggaaatcgatcctgcgggaaacacgtcgccgatgtcgccggcattcaacgtcacgatcgaccgcacggtcgtggccccggtcctcacgctgcagaacgacacgcaatattcgggcagcccgaactggagcaccggcaccaatagcggtggcgcaggttcggccaacttcggcacgaccacggacgggctgacgaaagcgacgcaaccgatcgtgtccggaaccgtggaaaacggctcgctcgtcgtcgtctatcgcgacggcgtgtcgatcgggcagacgacggctaacagcgcgggtgcatggtcctttacggatccggtttcgcaggcagacggcacgcatgcgtatgcggcttatcaggtcgatcgggccggcaatacgtcgggcctcggcgccaacctggcggtgaccgtcgatacgcagatcgaaaccgcgcgctacctgcctgccccgacgccggcgggcgcgagtccgaactactacgcgcagatcggcattccggcgctggcgaacggcctgaacgcgcaggagatctacaacgtggatgcggcgggccacacgggcgtgccggtgtacttccagatcgatccggccacggccgccaaaggcaaggccggcgatatcgtggtggtggacttcacgttcacgtatgccaacggcacgggcaccgcgaccgtaacgacggaagcgtcctacacgattcaggcgcaggatctggtggtcacggccggcaacacgccgacgctgacgacgtgggtcacgcccaacacgttcttcgccggcaacaactggttgagcaactacaccggcgtcaatcagatgacggtgcaactgcaggtgcgcgatcaggccggcaatgtcggcttcaccaacacgccgaacgtcgacacgatcaacggcgcgatgaacgcctcgcacgtgaacatcgacctgtggacgctggcgaccaacaccggcaccaatacgtggctcggcaacggcgtgcaggtctaccgcgaacttggacgcccggctgatcagctgggctggcaggtcatcgtcggcgacgatttcaacaacgacgggatccacgacctgttcatgtacgcgccgacgggcggcgccgccaacaacaacggccggatgtatctggtggccggccaggcggacaccgttgcgaacggcacggggttcgtggatctgcagaacgtcggaaccacgtccgactggagcgagaaccacggtcaaggcgctgccaccggcggctatgtctggaccggcgtgggcaatcagagttacacgaactggacttccgttgcggacatcacgggagacggccgcggcgaactggcgttcgatcagaccgtggggccattttcgcaaggtaatccggagatcgttgcgaacattctgtacagcgatgcggtcggcccgggcggcttccagcaagcgctgacggggctgacgcggcccgagatgacgcagttctacgttccggttcacggcgattcagcctataccagccgaggggtgtcgtcgaacttcgccgccgagttcggcgcgcttgcgacgcattacgacttcaacggcgacggccgtggagacctcctgtgggcggacggcggcacgggcaacatgggaaacagcacgaccgtctacggtagtgtcttggtgggcttcacgccgagttcggccgtggggctgtacgacttgaggctgcccggttcgtcgatgaaccagacggcgagcaagggtttcgatgtctacagcactgacccgctgcacccggtgggggcgaattccgccctcacgcaggcgcccaacaacgtctgggcgcagccgatcggagatctgaccggcgacgggctgaacgacatcatcgtgggccagccgaacggcacgttcaacaatctcgcgaccaacggccgcgtggcggtcatcttcggccgcaacgacggccagggcgtcgacatcaacaatctctccgccggccagggcttctatatcacctggaacagcgcggtcaatgcgggcgacgtattcggtcagcagatcaaggtgatggatctgaacagcgacggttacgacgacgttgcgatctcgatccgttgttccgccgcgccgaacacgagcagcaacgattcgttcgatttcgtgatcgacggcaagtggctggcgaactacgtgcacaccaacctggccgcggggggcgccgtgccgacgctgagcatcgacgcgatctacaacgcgatggtcaatcacacggccacgccgatgggctggatcgacggcgacccgaccaatacgaacttcgcgggcaataccagctatccgctcaacgtgggtacgccggtgctgaagacagacctgaacggcgatggctaccaggacaccgtgatccggaacggcacgcagtattacgtgttgtggggtagccccgactatcacgcaggaacggatacgaactacggcaccacgttcttcaatcagccgaatcacctgtcattgctgaacaacaacgtgggcggcgcgccggtccagttcgccgacatcaacggcgacggcctgtgggacatgatgatctcgcaaccaggtaacgcgacggacggaacgaatggcggcctggtcgaagtggtgtatggcgtcaatagtcagtcgggctccgcgccaggctcgccgctgccgttcgcgtccagctacaccaatagctggacggcgggcgccgacacggtgacgggctcgagcggccgcgacatgctcaacgggggcgcaggcaacgacacgattgtcggcaacggcggcgtggacgtgctcgagggcggcggcggcaacgacatgctcgtggtcaacggcgacaacatcgcgcacttcacgacgccgggttcgtactgggacggcggcatcatgatgggcggtgaaatcaacacgctgcagttcgacgccaacaacacggccaacgcgacgctggatctcacgcaggtgagcgtgggcaacaacctgtcggcacaccttcacaatatcgagcgcttcgatctgaacggcaacggcaacatgctcaaattcgatcttcgaagcgttctggatacctcggcaatgggcgtattcctggacggcgggtcgagcggcgaaacctggtcgggttcgacctgggatccgggctatacgggctcgcacggcaaccgcacgacgccgttgggtccgaacgttccgatgaaacaatgggtgatcgacggcaatgcgaccaacacgctggatttcgagccgttcactcaaatggctcaaaccggcgccagcacgggcctgaccggcaattgggcccttgtcgggcacgtgacgcacaacgacgtgcacggtgtctcgcagaactacgacatttacgagttcagtggccagaacgcgcagatcatcgtgaaccacaacatccatctgacccacgcaggttcgggcacgacgctgtaa

SEQ ID NO: 1047 - DNA, 4821 bp, Burkholderia pseudomallei
ttgtcgtccattgcgctggcggcgtgcatattgatcgggagccttgggtccacgctgccggctgtggctggtacggtaataggcggcggggctcaataccccaattcggtaggcggaacgagttctacgaccggcgatttgggcaacagctatattggtgcgagcggtatgggtaccgccattactggggataatgattgcctgagcttgacttcgacccgcaacgtgctaaacagtgcgaatgtcggctggcttttgggaacgacttcacagaccaccgatcctggtccgttgtaccccggccccggcgcggaaaacaaccagactatcagttacagtggcacctccaatttttcgggtggtggaaatagcgcggctggtgcccaggcgaccctcgcctggggcttcaattccttcgcagcggggtgtgggaacaaatcgcttggcatgggttcgagtacgctcgggctcaataacatggccagcttggccggttcaactgcgatcgggatcgctaataccgcgtcaggagcgggcggaaccgcgatcggtctctacaacactgccgctggcacgggcagcgttgcaatgggcattggctctcaagcgacaggcaatggaacgatcgcactcggatacggcggcggcggcacctcgagcaacgccacattggcgagcggcagcaatgcgatcgcgataggcggagacgcgaccaaaggcgcgcaggcgacgggaagcgattcgatcgccatgggcagcgaggcggccgccagcagttccagcacgaccgcaatcgggcaatatgccaccgctagcaatacgaatgccacggcgctcggcgcgggcggaacatccgccgccactggcgtaatcgcaagcggtgcgggcgccgtcgcgctcggtggcaacagtacgcaaggcgcgcaggcgttggcaagcaacgccattgcgatcggcggccaatcgcaagccgctagcgccggtgcgatcgcgatcggccagagcgcactggccacgggtgggcaagcggtgtccgtcggcgtgggcaataccgcgaacggcaatggcgcggtggcgatcggcgatccgaacgtcgcgaccggcacgggagcggtggcgctgggggcgaacaataccgccaccggacaaggcgcggttgcgctcggcaacgctgatattgccacgggccaaggttcggttgcgctcggtaatgtgtcgacggccgccggtgcaggatcggtggccttcggctcgaatgccgtagccaacaacacgaacgatgtggcgctgggctccggatctgtgacagccgcgccgaatccgacggggagtgcgacgatcggcggaaccacatattcgtttgagggaaccaatccgacgagcgttgtgagcgtgggcgcagtgggcgcggaacgccagatcacgaacgtcgcggcgggacaactgacggcgacgagcacggacgcagtcaacggttcgcaactttactcgacgaatcaggcgattaatacattatcgacgtcgacttcgacgggcctgtcgtcggcgaatagctcgatcgcgtcgttatccactggcctcgcatcgtccggcaacctggcttcgctgtcgacgtccacgtcgacaggcctgtcatcggcgaatagctcgatcgcgtcgctgtcgacgtcgacttcaacgggcctctcgacgaccaacagcaacatcggctcgctgtcgacaggccttagcacgactaatagcacggtcgcatcgttatcgacgtccacgtcgacgggattgtcgtcggcgaccagctcgatcacgtcgttgtcgacgtcgacctcgagcggcatcagtaccgctcagagcggcgtcaattcgctgtcgactggcctgtcgaccaccaacagcgcagtcacctcgttatcgacgtccacgtcgacgggattatcgtcggcgaccagctcgatcacgtcgttgtctacgtcgacgtcaactggaatcggctcgctgtcgaccggtctgagcacgaccgacagttccgtaacgtcgctgtcgacgtcgacctcgagcggcatcagtaccgctcagagcggcgtcaattcgctgtcgactggcctgtcgaccaccaacagcacggtcacctcgttatcgacgtccgcgtcgacgggattatcgtcggcgaacagctcgatcacgtcgttgtcgacgtcgacctcgactggattgagctcgttgtcgacgggaatcgcgaattccgttcagtatgacaacaccagccatactcaagtcacgttgggaggagccggcgcgacgacgccggtgacgctgaccaatgtcgccgcgggcgtgaatcccaccgatgcggtgaatatgagtcagctgacttcgctgtcgacgtcaacgtcaacgggactgtcgacgaccaacagcaacattggctcgctgtcgaccgctctgagcacgaccgacagttccgtgacgtcgctgtcgacgtcgacctcgagcggcatcagtactgctcagagcggtgtcaattcgctgtcgactggcctgtcgaccaccaacagcacggtcgcatcgctatcgacgtccacgtcgacgggattgtcgtcggcgaccagctcgatcacgtcgttgtctacgtcgacgtcaactggaatcggctcgctgtcgaccggtctgagcacggccaacagttccgtgacgtcgctgtcgacgtcgacctcgagcggcatcagtaccgctcagagcggcgtcaattcgctgtcgactggcctgtcgaccaccaacagcacggtcgcatcgctatcgacgtccacgtcgacgggattgtcgtcggcgaccagctcgatcacgtcgttgtctacgtcgacgtcaactggaatcggctcgctgtcgaccggtctgagcacggccaacagttccgtgacgtcgctgtcgacgtcgacctcgagcggcatcagtaccgctcagagcggcgtcaattcgctgtcgactggcctgtcgaccaccaacagcgcagtcacttcgttgtcgacgtccacgtcgacggggctgagctcgctgtccacgggtctgtccgcgaccaacagcaacatcagttcgctgtcgacttcgacctcgaacggcctgagcacagctaacagcaatatctcgtcgctgtccactgggctgagttcgctgtcgaccgcagtcaacggcggcgggaccaagtactttcacgccaactcggcgcagccggacagtcaggcgctggggacgaacgcgatcgccgtcggaccggcggccacggcatccggcgcaagcggtatcgcgatcggcgataccgcgaacgcggctgcaactggcgcggtggcgattggccagaccgccgttgcaacgggtggtcaggcggtctcgatcggtgttgcgaatacggcgagcggcgacggcgcggtcgcgatcggtgatccgaacgtcgcgacgggtactggtgcggtcgcgctgggcgcgaacaattctgcgaacggccagggcgccgttgcgctcggcaatgcgaacgtggcaaccgggacaggctcgctggcgctcggcagcacatcgacggcggcggggggcggctcgatcgcgttgggcacgaatgcaatcgcgaacaatgccaacgatgtcgcgctgggttccggtagcgtaaccgcagccgcgaatccggtcgccagtgcgctgatcgccggtcagacgtattcgctcgccggcggttcaccgacaagcgtggtgagtgtcggtgcgccgggtgcagaacgacaaatcaccaacgtcgcggcagggcaggtttccgccacgtcgaccgacgcggtgaacggatcgcagatgaacgccgtgacccaagcgctggtatcgttgtcgacttcgacagccaatgcgttgtcgacgacgcaaaacggtctgagttcgttgtcgacagggctgagcacgacgcagagcagtgtgagttcgctgtcgacgggccttagcacgacgagcggtaacgtgtcgtcgctgtcgaccggcttgagtacgacgcagagcgatgtcgcgtcgctgtcaacgggactgagtacgacgaacagcaatctcgcgtcgttgtcgactgcggtgtccaacggagggattcacaccaacggcgcgggcggcacgtcgatggggccgggagccgacgcgtcgggcagcaacagcacggcggtcggtggcgcagcgtctgcttcgggagccaatgcaacggcgctcggccaggcgtcgaacgcatcgggcaataattcgacggcattagggcaagcatcgagtgcatccggaagcggctccaccgcggtggggcagggcgcgagcgcgtcgggcgatgggtcctcggcattcggccaaggggcgattgcctccggcacgaactcgacggcgctgggcgctcattcgacggcatcggcgccgaattcagtggcgatcggcgcgaactcggtagcttccgcgccgaacacggtgtcgttcgggtctcagggccatgagcgtcgactgacgaacgtcgcaccggggatggacggtaccgacgcagcgaacatgagccagctttggggcgtgcaatcgagcgtagaccaagccgcgcgccgtgcgtattcgggtgtggcggctgccaccgcgctgacgatgattccggaagtcgatcctggcaagacgattgcagttgggatcggtgccggcagctatcaagggtattcggcatccgcgatcggtgtgtccgtgcggttctccgacaacctgaaggcgaagctcggcatggggatcagcagtcagggcagcacgtacggcggaggcatctcgtaccagtggtaa

SEQ ID NO: 1048 - DNA, 192 bp, Burkholderia pseudomallei
atgctgcgtttcatccaatcgctttggcgcgacgagcgcggggtcagtgcgctcgaatattcggtgctggccggcatcgtggtggtggcggtcgctgcagcgggcgccattttcggcggcggctccggcttgccggaattgttccagaacatgatcaccaaggtgacgagcgtacagaccaacggccattga

SEQ ID NO: 1049 - DNA, 396 bp, Burkholderia pseudomallei
atgacgacgcatgacctcacccagactgccgcgccccgcgccgggcgcggccgcgcgctgtgcgcggccgcgctcgcgctcgcgcttgcgtgcgcggtgggcgccgcccgcgcgcaatcgccgcagcgcgacgcgccgagcgcatcggaaatcggccacgcgacgcagacgtggttcgcgctgcaggcgagcaaccgggaggcggcgccggcgcagccgatgatcggcgaggcggcgtcgctcgcgtacgcgcgctatatcgagtcgttcaggacgaagatcccggccttctacggatcggccgcgggcatgagcggtatgagcggcgggggcggcgggggcggcgggggcggcggcgcgggctattccctcgcgccggcatcgggttcgcagtga

SEQ ID NO: 1050 - DNA, 138 bp, Burkholderia pseudomallei
atgtggaacgaaaaaaggttcggatataagatgcgctcgtgcgctatttgtacgacctggtacatcagggaatacgaggaggacgccgccgacatgaatgttaacttgtatcaaattgttaaaaactctcgaaaatag

SEQ ID NO: 1051 - DNA, 1497 bp, Burkholderia pseudomallei
atgaaaaccttcccgttgtccgcttgccggaccgccgtggccgtcgcggtcgccgcgctcgcgctcgcgggatgcgcgaactatttcggcctcaagagcgacaaggcgatcgctcccgcggcgcagttcgaaagcgcgcggagcctgcccgcgcagggcggccaatggccgtcgctcgactgggcgaaccagttcggcgatccgcaattgccgaagctgatcgacgaggcgctcgaaggcaatccgacgatcgcgcaggcgcaggcgcgcatcgcgaaggcgtcgtcgtacatcgagtcgtcgcgctcgacgctgctgccgaaggccgacgcgaagtactcgtggacccgcgagctgtactcgggcaacgcccttttcccgcccccgtacggcggccagtggtacagcgagaacaacgcgctcgcgagcgcgtcgtgggagctcgatctgtggggcaagaaccgcgcgcgcctgaatgcggccgtgtcgcaggaaaaggccgccgaagccgacctgcagcaggcgcgcgtgacgctcgcgacgtcggtcgcgcgcacgtacaaccagctcgcgcaactgtacgcgctgcgcgacatcgccgggcgcgagatctcgaaccggcagacggtcggcaagatcaccgacggccgcgtcggcgcgggcctcgacacgaacgtcgagcgccagaccgcgcgcggcaacatcgcgacgagccagtcgacgctgtccgatctcgacggccagatcacgaacgtccgctatcagctcgccgcgctgctcggcaaaggtccggaccgcgggctgcagatcgccgcgcccgtgctgagcgcgggcggcgcggtcgcgctgccggagaacctgcccgccgatctcgtgtcgcgccgcccggatctcgtcgccgcgcgctggcaggtcgaagcggcgatgcacgacgtgaaggaagcgaaagccgagttctttccggacatcaacctcgcggcgggcttcggcttcgacgcgttcggctggggccgattcctgaacttcgcgagccgccaggcgcagttcggccccgcgatccacctgccgatcttcgacggcggcgcgctgcgcgcgcaattgaagggccgctacgcggacttcgatctgtcggtcgcgaactacaaccagacgctcatcaacgcgctgaacgacgtcgcgacgcaagtcgcgtcgattcgctcggtcgacacgcaaatgggcgacgcgcagcgcgcgctcgatgcgtcgacgcgcgcctacgagctcgcggtgatccgctacaaggcgggcctgtcgccgcagttgcaggtgctcaacgcggacagcaaccggctcgccgccgagcagacggtgacgaacctgaagatgcgccgccgcgacctgcagatcggcctcgtgaaggcgctcggcggcggcttcgacgcggccggcacgcggctcgccgcgcccgcccccgcctcggcgccggccgcgcccgcgcagcacgcatcgaactga

SEQ ID NO: 1052 - DNA, 225 bp, Burkholderia pseudomallei
gtggtcgtttcgctggcactcgcccctccctcgcgcgccgaccaattttctccccggcagcacgctcagcgggaacagttcgcccgctcgcaagcgaatgcggctgcgcccgccgatgcgcgccccaatgtgccgcgcggcaatctgcgcggcgacatcgccagcaacgcgcgtgcgcgcaacaacgacgcgcaacgcccgcccggcgactcgaaccatcactga

SEQ ID NO: 1053 - DNA, 705 bp, Burkholderia pseudomallei
atgaacaaagtctacccaagcgcggctgccgcgctcgagggcgtcgtccatgacgggcagaccttcgcggtcggcggcttcggcctgtgcggcattccggaagcgctcatcgccgcgctgcgcgattcggcggtgaagggcatcacctgcatcagcaacaacgcgggcgttgacggcttcggccttggcctgctgctcgaaacccggcaaatcaagaagatgatctcgtcgtacgtcggcgagaacaaggagttcgaacgccagtatctgtcgggcgaactcgagctcgagttcacgccgcagggcacgctcgcggagaagctgcgcgcgggcggcgcgggcatcccggcgttcttcacgcagacgggctacggcaccgtgatcgccgaaggcaaggagacgcgcgagttcgacggcaagcattacgtgctcgagccgtcgctcacggcggacgtcgcgctcgtgaaggcttggaaagccgacaagtcgggcaacctggtttaccggcgcaccgcgcgcaacttcaatccgatgtgcgcgatggcgggccggatcacgatcgccgaggtcgaggagatcgtcgagaacggcgagctcgatccggatgcgatccacacgcccggcattttcgtgcagcggctcgtgctcaacgcgacgccggaaaaacgcatcgaacaacgcgtcgtgcgcgcgaaaggagactga

SEQ ID NO: 1054 - DNA, 2049 bp, Burkholderia pseudomallei
atgcgcaagaaaagcttggttcatttgcccgtcgcgctggcggtggccgcggcgctcggcgcgtgctcgggcgacgacgacgcgacgctcgagtcgcgcgcggacgcgatcgtcgaacgcatgacgacccggcagaaggtcggccaaaaactgatgatggcgttccggtactggtgccccgacgggcagcccgcgtgcacgaccggcatgaccgaatttccggacgccgcgcgcgacgcgctgcgcgagaacggcattggcggcgtgatcctgttctcgaacaacctgacgggcatcgagcagacgcgccggctgatcgacggcattcgggccgcgcccgcggccgacagcccgctcgggctgatgatcggcatcgacgaggagggcggcaacgtgtttcgcctgccgcgcgtcgaggcgaccgcgttcgccggcaacatggcgctcggcgcggcgtacgaagcgacgcgggacgaccggctcgcgtacgacatgggccgcgtgctcgccgcggagatcgcggcggtcggcttcaacgtgaatttcgcgccggacgtcgacgtcaacagcaatccgctcaatccggtgatcaacgtgcgcgcgttcggcgacgatccggcgacgatcggcctgctcggccggcgcatggtgcagggcatgaagagcgagcgcgtgatcggcacgttcaagcattttcccgggcacggcgacacggataccgattcgcactacggactgcccgtcgtgatcaagtcgcgcgccgacgcctacgcgatcgatctcgcgccgtaccggcaggcgatcgaagcgggcgaggcgcccgacatgatcatgaccgcgcacatccagtatccgtcgctcgacgacacccgcgtcgcgacccgcacgggcgagcagatgatcgcgcccgcgacgatgtcgcggcgcatccagcacgatatcctgcgcggcgagttcggctatcagggcgtgacgatcaccgacgcgctcgacatgaagggcatcgccggcttcttcgacgaggacgacgcggtcgtcaaggtgttccaggcggacgtcgacattgcgctgatgcccgtcgagtttcgcaccgcggccgatgccgggcgcctggcggcgctcgtcgatcgcgtcgccgcggcggtcgattcggggcggatcgatcgcgccgagttcgatcgctcggtgcgccgtatcgtgctgacgaagctgcgccacggcatcgtcgcgtcggatcgcggccggccggtcgacgagctggcatcgatcggcgggcccgcgcaccgcgcgatcgagcgcgacatcgcgcaaaaatcgatcaccgtgctgcgcaacgagaacggcgcgctgccgctgcaggccgcgggccggcgcatcttcatcctgacgccgtggggcgagcaggccgaggcgatgcggcggcgtttcgtcgagcttggccatccgctcgtcacgggcgcgaagctgagcacgatcacgtgggccgaacagcagcaggcgatcgatgcggccgacgtcgtgatcgtcggcacgctgtcgacgggcgtcacgcccgtcgagcacaacggggatccgaacgcgcgcgtgagcccgccggcgccgtcggccgtgcggatgcggcaggccgcgcccgcgaacggcgaggaggagggttcggtgatcttcgaccacgtcgagcgggcggacgcggcgaaggacatcggcgcgcgcccgagcgtgctcgcggcgatcgcggcgccgagcgaggcgcagcagatgcgcgacgcgatggactacgcgaaggcgcggcgcaagaccgtgatccacgtgacgatgcgcgcgccgtacgacgtgatcagctacgacgatgtcgcggacgcgacgctcgccacctacgcgtactacggctacgaaggcggcttgcgcggcccgtcgctgcccgcggccgtcgacgcgatgctcggcgtcgcgcggccggtcggcaggctgccggtcgcgatccacgcactgaacgcggacggatcgacggggccgctgcgctacgcgcgcggattcgggttgcagtactga

SEQ ID NO: 1055 - DNA, 1386 bp, Burkholderia pseudomallei
ttgccgcgatacgcccgccagcaccgttcgttcttcgtcgcgccgcgcgcgttcgcggccgccgccgcgcttgccgcgggcgtcgccgcgtgtgacgcgaacgggccgggcgcgagcgccgccgcggccgtcgcgcccgctgcgctcgctgtcccagctgcctccgctgcgcgtcccgcgccgctcgcgcagccggccgcgcccgccatcgtcgacagtcagccgcagacgcgcgcgcaggtgtacgaggcggtcaagcagatgacggcgctcggcaggcagttgttcttcgatccttcgctgtcgggcagcggcaagctcgcctgcgcgtcgtgccacagcccgcagcacgcgttcgggccgccgaacgcgctgcccgcgcaattcggcggcgacgatctgcgccagcagggctttcgcgccgtgccgacgctcaaatacctgcagaaggtgcccgcgttcagcgagcactatcacgaatcggacgacgagggcgacgagagcgtcgacgccggcccgacgggcgggctcacgtgggacggccgcgtggacagcggcgccgagcaggcgcgcgcgccgctcacgtcgccgttcgagatgaacggcacgcccgagaaggtcgcgcgcgccgtgcgggccgcgccgtacgcgcccgcgtttcgcgcggcgttcggcgcgcgcgtgctcgacgacgaccgcgcgacgttcgaggcggtgctgcaggcgctcggcacgttcgagcaggcgcccgacgtgttctatccgtacacgagcaagtacgacgcgtacctggcgggccgcgcgcggttgacgcgcgccgagctgcacgggctgcaggtcttcaacgacgagaagaagggcaactgcgcgagctgccacgtgagccggcgcgggctcgacggctcgccgccgcagttcagcgatttcggcctgatcgcgctcggcgtgccgcgcaatcgcgcgctcgcggtgaatcggaatccgaatttttacgacctcggcgcatgcgggcccgagcgccgggacctgaaggggcgcgacgagttctgcgggctgttccgcacgccgacgctgcgtaacgtcgcgctgaagaagacgttcttccacaacggcgtctatcactcgctcgacgacgtgctgcgcttctacgccgagcgcgacacgcatccggagaagttctatccggtgaagcgcggcgtcgttcagaagttcgacgacttgccgaagcgttactggaagaacctgaacgacgagccgccgttcgagcgcaagcgcggcgatccgcccgcgatgaccgatgcggagatccgggacgtgatcgcgttcctcggcacgctcaccgacggctacgatccgcgcgcgaagccggcaggcggcgcgcgctga

SEQ ID NO: 1056 - DNA, 525 bp, Burkholderia pseudomallei
atgtcgaccttacaacgagtgcttttcctgctgggcgtcgcggcgtggccggctgccggccgggccgacacgctgctgccccgaacccaggccttcacggtcagcgcgcagatcgtcgcgggctgcggcgtcgcgggcggcgggccggcgagcggcctgaacttcggcacgctcgacttcggcgcgcatccggccgtcgcgacggggcaggtgagcgcggccgtcggcggcggcgcgttgcagatcgaatgttcgccgggctcgacgttgaagatgacgatcgacggcggcgcgaacgcgagcgcgggcaacacgcagcgcaatctggcgagcggcggcgcgcgcgtcgcataccggttgtattcggacccggcgcgcacgcaggcgatcgcggtcgggcaggcggtgtcgctgcccgtgtccggcacgatcacgctgccgatctacggcgcgctcacgctgccgggcggcggcgcgcccgccggcacgtataccgataccgcgcaggtcacgctcagttattaa

SEQ ID NO: 1057 - DNA, 546 bp, Burkholderia pseudomallei
atgcacaagcgtgaggtgcaggtggtgagcggggcggcattcatgctgtttttcgcggctgcctcggccgggcaactgaccggcacgatgcaggtgaatttgcaggtcagtcgcggatgcgaggtcgcgggtgtggccgcaagcggggacttgggccggctggatttcggcgcgcaagggccgctctggtccgactacctgacggccgacggccgcgccacgtcgagcggcgcggtgcgcgtcgtgtgcagtccggacgtcaacggctttctggtctcgatcgacggcggtcgcaacggggatcagtcgacccgctatctggtcaagcgcggcgcaaacgggcgcgtcgccggccggattccctacaacgtgtaccgcgacgcggcgcgcagcgtgccgtacgtgccgctcatgccgcagtcgttcctcgtcgacggggggcgggacgacgtgacgctgccggtgtacggcgtcgtcaacggcatgacgcgcgcggtgccgtccgggacctacgaggatttgctcggcatcacgctcgactggtga

SEQ ID NO: 1058 - DNA, 3273 bp, Burkholderia pseudomallei
atgaacaagacttatcgggttagctggagcgcgtcgcggggtgcgtggatggtggcgccggagacggcgcgtcgcaaagggaaaggacattcgctgacgatcgtgtgcgcgatcgcctcaggcctgctgcttgcggcgcctgcgtgggcggacacggtgtcgccctcgggcacggataacgtctacggcgtcgacgcgaccgatcccggcgtgtcgacgaaccagggcaatacggcctacggggcgcaggcgggcgcgaaggtcacgggttcgtacaacaccgcgatcgggtatcaagcagggcagaacgtgaacgccatcgataccgtatcgatcggcaagcaggccaccgcgagcgcgaatgacgcgatcgcgatcggcacgaacacgaaggcgagcgggccggccgacatctacatggggctgaacgcaggcgccggcgccggctcgacgacgagcccggacggcaccgtcacgctcggcattcgcaacatgggcctcggggaatccgcgggctcgtacgtgacgggccagaacaacacggggatcggctatcagtcgggcatgaacgtgacgggcgaccagaacgtcggcctcgggcagcaggcgggacaattcgtgaccgggaccggcaactcggcgatggggcatctggcggggtcgacggtgtcgggcagctacaacgccgcgttcggcgagtatgcggggaccaacacgagcggcggcgccaatgccgcgttcggcttctatgcggggcgctacatcaacggcacgaacaacacggcgctcggcgcgtacgatctgccggtcgtcaatggcacctggtacggttcgtacgtgacgggcagcaacaacctcggcgccggccataattcgggcgcctacgtgagcggcgcgagcaacgtcgggctcggcgacggcgcgggcacgttcgtgaccggcagcaacaacgtcgccatcggcacggcagcgggctcgggcgcgtataccagcggtccgagcggcgcgacgctcaatgcggcgctcgtcgcgagcaacaccgtgagcatcggtacccgcgccacggcgagccagagcgacgcgatcgcgatcggcaagggcgcgaccgcgagcggcgcgcaatcgatcagcatcggcaccggcaacgtcgtgagcggcaagggaagcggtgcgatcggcgatccgagcaccgtcagcggcgcggggtcctattcgatcggcaacaacaataccgtcgcgaacagcaacacgttcgtgctcggcaacggcgtgacgacgacgcaggacaacagcgtcgtgctcggcaatcagagcaccgaccgcgcggccgtcgcggtttcgagcgaaaccatcaatggcacgacgtacaactacgcgggcgtcgcgagcccggccaacggcgtcgtcagcatcggcggcgtgggcacggagcgccagctcatcaacgtggcggcgggccaggtgagcgcgaccagcacggacgcgatcaacggcagccagctgtacgcgacgaaccaggcggtgatcgccgaggacgcgaaagtgaattcgctcggcggcggcgtggcgagcgcgctcggcggcaacgcggcgtacaacgcgacgaccggcgcgatcaccgcgccgagctacgcggtctacgggaccacgcaaaactccgtgggcggcgcgatcgatgcgctgcaggccctcgcgccgctgcagtacacgtccggcccgggcgtgaccacgccgaacgcgccgggatcggcgccgacgaacacggtgacgctcgtcggcgccggcgggccgggagccaataccacgccggtgacgctcacgaacgtcgcgccgggcaaactctccgcgaccagcacggacgcggtcaacggctcgcagctctacgcgaccaaccagcaggtcgcgaacctcgtgagctcggtgaacaacggcggcgtcggcccggtgcagtacagcgatcctagcgcgccgacgacgcccaacggcggcaagccctcgcaggacctgacgctcgtcggcgcggcaagcggccctgtcgcgctgcataacgtcgcgccgggcacggcgtccaccgatgcggtcaacgtcgggcagctcggcgcggtgacgaccggcctgggcggcggcgcggcgatcgatccgaagacgggcgccgtgaccgcgccgtcgtacacggtctacaacgccgacggcacgacgtcgaacgtcggcaacgtcggcgcggcgatcgatgcgatcaactcgaccggcatcaagtatttccacgcgaacagcacgaagccggacagccaggcgctcggcgcggacagcgtcgcgatcggcccgaacgccgtcgcgaacaacgcgggcgacgtcgcgctcggttcgggagcggtcacgtcgcaagcgggcggcacgctgagcgaaacgatcaacggcgtgacctactcgttcgccggcacgacgccgatcggcacggtgagcgtcggcgcgccgggcgtcgagcgcacgatcaccaacgttgccgcggggcgcatcgggcagtcgagcacggacgcgatcaacggctcgcaactgtacggcaccaaccagtcgatcgaggcgttgacggacaagatgaacagcctcggcaacaccgtggcgaacacgctcggcagcggcgcgtcgtacaacccgcaaacaggcgcggtgaacggcccggccaactcgggcggcgtggtcacgcccacggtgatccaggaggcggcgaacaaatgggtgagcgccaatccgtcgacctacgtggcgcccgtcgcgacgggcacgaacggcatggcggtcggcagcggcgcggtttcgacgggccagaactcggtcgcgctcggcacgaacgcgtcggacggcggccgctcgaacgtcgtgagcgtcggggcgccgggcgcggagcgccaggtgacgaacgtggcggccggcacgcaggcgaccgatgcggtcaacctcgggcagatgaacggcgcgctcgcgcagcaaaccgacagcttcaaccagcggctgggcgcggttcagcaggacgtcgacaacgtcgcgcgcgccgcctacggcggcatcgcggccgcgaccgcgctcacgatgatccccgaggtcgacaaggacaagacgatcgcggtgggcatcggcggcggcacgtatcgcggctaccaggcggtggcgctcggcgcgacggcgcgcatcaccgagaacatcaaggttcgtgcgggcgtcggcatgagctcgggcgggacgacggccggcatcggcgcatcgatgcagtggtaa

SEQ ID NO: 1059 - DNA, 645 bp, Burkholderia pseudomallei
aaagggaaaggacattcgctgacgatcgtgtgcgcgatcgcctcaggcctgctgcttgcggcgcctgcgtgggcggacacggtgtcgccctcgggcacggataacgtctacggcgtcgacgcgaccgatcccggcgtgtcgacgaaccagggcaatacggcctacggggcgcaggcgggcgcgaaggtcacgggttcgtacaacaccgcgatcgggtatcaagcagggcagaacgtgaacgccatcgataccgtatcgatcggcaagcaggccaccgcgagcgcgaatgacgcgatcgcgatcggcacgaacacgaaggcgagcgggccggccgacatctacatggggctgaacgcaggcgccggcgccggctcgacgacgagcccggacggcaccgtcacgctcggcattcgcaacatgggcctcggggaatccgcgggctcgtacgtgacgggccagaacaacacggggatcggctatcagtcgggcatgaacgtgacgggcgaccagaacgtcggcctcgggcagcaggcgggacaattcgtgaccgggaccggcaactcggcgatggggcatctggcggggtcgacggtgtcgggcagctacaacgccgcgttcggcgagtatgcggggaccaacacgagc

SEQ ID NO: 1060 - DNA, 882 bp, Burkholderia pseudomallei
atggcggcaattaccgcaagcatggtggcagaactgcgcgcgaagaccgacgcaccgatgatggaatgcaagaaggcgctgacggaagccgacggcgacatggccaaggccgaagagctgctgcgcgtgaagctcggcaacaaggcgagcaaggccgcgtcgcgcgtgacggccgaaggcgtcgtcgcatcgttcgtcggcgcgaatgccggcgcgctcgtcgagctgaactgcgaaaccgatttcgtcgcgaagaacgacgatttcaatgcgttcgcgaagacggtcgcggagctcgtcgcgacgcagaacccggccgacgtcgccgcgctgtcggcgctgccgctcgacggcaagaccgtcgacgaagtgcgcctcgcgctcgtcggcaagatcggcgagaacatctcgatccgccgtttcgtgcgtttcgaaacgtcgaacaagctcgcgacgtacctgcacggcagccgcatcggcgtgatcgtcgagtacacgggcgcgcaagagcaggtcggcaaggatgtcgcgatgcacgtcgccgcgatgaagcccgtctcgctgtcggccgacgaagtgccggcggacctgatcgagaaggagcgccgcgtcgccgagcagaaggccgcggaatcgggcaagccggccgagatcgtcgcgaagatggtcgacggcagcgtccagaagttcctgaaggaagtgtcgctgctgaaccagccgttcgtgaagaacgacaagcagacgatcgagcagatgctcaaggccgcggatgcggcggtgcagaagttcgccctcttcgtggtcggcgaaggcatcgagaagcgccaggacgacttcgccgcggaagtggccgcgcaagtcgccgccgcgaagcagcagtaa

SEQ ID NO: 1061 - DNA, 1254 bp, Burkholderia pseudomallei
ttgaaactcccgtacgaatggcagatcggctggcgctacacgcgcgccggcaaacgcacgaccggcaacggcttcatttccttcatcgcgctcgtgtcgatgctcgggatcgcgctcggcgtcgcggcgctcatcgtcgtgctgtcggtgatgaacggcttccagaaagaggtgcgcgaccggatgctgtcggtgctcgcgcacgtcgagatcttctcgccgacgggctcgatgcccgactggcaactgaccgcgaaggaagcgcgcctgaaccgctcggtgatcggcgcggcgccgtatgtcgacgcgcaggcgctgctcacgcggcaggacgcggtgagcggcgtgatgctgcgcggcgtcgagccgtcgctcgagccgcaggtgtccgacatcggcaaggacatgaaggcgggcgcgctcaccgcgctcgcgcccggccagttcgggatcgtgctcggcaacgcgctcgcgggcaatctcggcgtgggcgtcggcgacaaggtcacgctcgtcgcgccggaaggcacgatcacgccggccgggatgatgccgcgcctgaagcagttcacggtggtcggcatcttcgagtccgggcactacgaatacgacagcacgcttgcgatgatcgacatccaggatgcgcaggcgctcttcaggctgcccgcgccgacgggcgtgcggctgcgcctcacggacatgcagaaggcgccgcaggtcgcgcgcgagctcgcgcacacgctgtcgggcgacctgtacatccgcgactggacgcagcagaacaagacgtggttctccgcggtgcagatcgagaagcggatgatgttcatcatcctcacgctgatcatcgcggtcgcggcgttcaatctcgtgtcgtcgctcgtgatgaccgtgacgaacaagcaggcggacatcgcgatcctgcgcacgctcggcgcgcagccgggctcgatcatgaagatcttcgtcgtgcagggcgtgacgatcggcttcgtcgggaccgcgacgggcgtcgcgctcggctgcctgatcgcgtggagcattccgtggctcattccgatgatcgagcatgcgttcggcgtgcagttcctgccgccgtcggtgtacttcatcagcgagctgccgtccgagctcgtcgcgggcgacgtgatcaagatcggcgtgatcgctttcgcgctgtccgcgctcgcgacgctctatccgagctggcgcggcgcgaaggtgcgcccggcggaggcgctgcgctatgaatga

SEQ ID NO: 1062 - DNA, 210 bp, Burkholderia pseudomallei
atgaaatggaccgattcccgcgagatcgcgatcgcgctcgcggaccagcatccggatgtcgatccgaagacgatccgctttaccgagctgcgccagtgggtgctcgatctcgacggcttcgacgacgatccggaccattcgggcgagaagattctcgaggcgatccaggcgcactggatcgacgaatcggatttcgacgacgaggattga

SEQ ID NO: 1063 - DNA, 570 bp, Burkholderia pseudomallei
atgtccttgctgacccccgagcaaatcgccgccgcccagaaagccaacatcgaaagcctcttcggcctcacgacgaaagcgttcgaaggcgtcgaaaagctgatcgaactgaatctgcaagtggtgaagtcgacgctcgccgaaagccaggaaaacgtgcagcgcgcactgtcggtgaaggatgcacaggaactgctcgcgctgcaggcgagcctcacgcagccgatcgccgagaaggtgctcgcgtacggccgtcacgtgtacgaaatcgcgtcggccacgcaagccgaattcgcgaaggtcgccgaggcgcaatacgaggaacagaaccgcaaggtgcaggcgctcgtcgacaacgtcgcgaagaacgcgccggccggctcggaaaccgctgtcgccgcgctgaagtcggcgatcaacgccgcgaacacgacgtacgaaacggtgcagaaagccgcgaagcaagcggtcgagatcgccgaaacgaacttcaacgccgccgccgccgtcgccacgaaggcggcgaacaccgcggccgccgcgtcgcgccgcagcggcaagacggcgtaa

SEQ ID NO: 1064 - DNA, 936 bp, Burkholderia pseudomallei
atgacgattctggtgattgcggaacacgacaacgcgtcgatcaaggcggccacgctgaacacggtggcggcggcgacgaagatcggcggcgacattcacgtgctggtggcgggccataacgcgcagggcgcggcggacgccgcggcgaagatcgcgggcgtgagcaaggtgctgctggccgatgcgccgcaactggcggacggtctcgcggaaaacgtcgaggcgaccgcgctgaacgtcgcgaaggactactcgcacatcctcgcgccggcgaccgcgtacggcaagaacatcgcgccgcggatcgcggcgaagctcgacgtcgcgcagatctcggacatcacggcagtcgattcggccgatacgttcgagcgcccgatttacgcgggcaacgcgatcgcgacggtgcagtcgagcgacccgatcaaggtgatcacggtgcgcgcgacgggcttcgacccggtcgcggcgcaaggcggcagcgcgtcggtcgagaagatcgacgcggcggcggacgcgggcgtgtcgcagttcgtgagccgcgaggtgacgaagctcgatcgtccggagctcacgagcgcgagcatcatcgtgtcgggcggccgcggcctcggcagcggcgagaactacacgaaggtgctggagccgctcgcggacaagctgcaggcggcgctgggcgcatcgcgcgcggcggtggacgcgggctacgtgccgaacgattatcaagtgggccagacgggcaagatcgtcgcgccgcagctgtatatcgcggtgggcatctcgggcgcgatccagcacttggcggggatgaaggattcgaaggtgatcgtcgcgatcaacaaggatccggaagcgccgatcttcagcgtggccgattacggcctcgtcggcgatctgttcacgctcgtgccggaactcgtgaacgagctcggctga

SEQ ID NO: 1065 - DNA, 843 bp, Burkholderia pseudomallei
gtgcgtaccgccgacgggctcgagctcgcgtgctaccgttggccgtctaccgcgccttcgtgcgccgcgccgcgcgcgaccgtcgcgctcgtgcacgggctcgccgagcacgcgggacgctatcaggcgttcgccgagcggctgaacgcggcgggcatcgaagtcgtcgcgatcgatctgcgcggccacgggcgctcgcccggcgaacgcgcatgggccgagcgcttcgaccggtatctggacgacgcggacgcgctcgtcgcgagcgccgcgcgcgagaacacgccgctcttcctgatggggcacagcatgggcggcgcaatcgccgcgctctatgcgatcgagcgcgcggccgcgcgccacgcgagcctggcgggcctgatcctgtcgagccccgcgctcgcgccggggcgcgacgtgccgcaatggatgctcgcgatgagccgcttcatcagccgcgtgtggcctcgctttccggcgctcaagatcgacgccgcattgctgtcgcgcgatccggccgtggtcgccgcgaatcgcgccgatccgctcgtccatcacggctcggtgccggcgcgcacgggcgccgagatcctcgacgcgatgcggcgaatcgaggccggccgcgcggcgctgcgcctccccgtcctcgtctatcacggcaccgccgacaagctgaccgagcccgacggcagccgcgacttcggcgcgcacgtcggctcgcccgatcgcacgctcacgctatacgaaggcaactatcacgagacgatgaacgatctggaacgcgagcgggtgatcggcgcgctgatcgactggatcgccgcgcgcgtgccggctcgcggttga

SEQ ID NO: 1066 - DNA, 1140 bp, Burkholderia pseudomallei
atgaaaaagaccctcatcgttgccgctctttccggcgttttcgcaacggccgctcacgcgcaaagcagcgtgacgctgtacggcctgatcgacgccggcatcacctacacgaacaaccaaggcggccacagcgcatggtcgcaatccaccggctcggtcaacggcagccgctggggcctgcgcggcgccgaggatctcggcggcggcctgaaggcgattttcgtgttggaaaacggcttcggcatcaataacggcacgctgaagcagaacggccgcgagttcggccgtcaggcgttcgtcggcctgtcgcacgagcaatacggcgcgctgacgctcggccgtcaatacgacagcgtcgtcgactacctcgggccgctgtcgctgacgggcacgcaattcggcggcacgcagttcgcccacccgttcgacaacgacaacctgaacaattcgttccggatcaacaacgcggtcaagtacacgagcgtgaactgggcgggcctgaaattcggcgcgttgtacggcttctcgaacaacaatcagttcgcgaacaaccgcgcctatagcgcgggcgtatcgtacagctacgccggcttcaacatcggcgccggctacctgcagttgaacaacaacttcggcccgacggtctccaacgcatccggcgcggtcgcgctcgacaacacgttcgtcggcaagcgccagcgcgtgttcggcggcggcctgaactacacgttcggcccggcaacggccggcttcgtgttcacgcaatcgcgcgtcaaccgcgcgacggcaatcggcgcgggcgcatcgggcgtgtcgagcggcattgcgctcgacggcacgttcatgcgcttcaacaactacgaagtgaacgcgcgctacgcgatcacgccggcatggacggtggccggttcgtacacgtacaccgccggcttcatcgagaaccaccacccgggctggaaccaattcaacctgcaaacggcctacgcgctgtccaagcgcacggacgtgtacctgcaaggcgtgtatcagaaggtcaacaacgacggcacgggcctcggcgcgtacatcaacggtatcggcggcatgtcgtcgacggaaaaacagatcgccgtcacggccggcctgcgtcaccgcttctaa

SEQ ID NO: 1067 - DNA, 801 bp, Burkholderia pseudomallei
atgaaggcattcaaaccgatgttcacgtcagcactcgtcgccgcgctgctcggcgtcgcggccgcgtccgcgcacgcggccgacctgctcgacagcgtcaagcaggccggcgtgctgaagatcgcgctcgaaggcacctaccctccgttcgactaccgcaacggcgacggccagctcgaaggcttcgacgtcgacgtcgcgaaggaagtcgccgcccggctcggcgtgaagccgcaattcgtcacgaccgagtggagcggaattctcgcgggcctgcaggcgggcaagttcgacgtgatcgtcaaccaggtcggcatcacgcccgcgcgccggcaggcgctcgacttcagccagccgtacgtgtactcggccgcgcagctgatccagcgcgccgacgacaagcacgactacggcgcgccgggcgcgctgcagggcaagcgcatcggcgtcacgctcggcaccaacttcgccgatctcgcgaagacgctgcagggcgtcgacgtgaagacctatccgggcgcgccggagaaactgcgcgacgtcgccgctggccgcatcgacgtcagcatggacgaccggctgatgctgccgtacctgatcaagaacgcgcacatgccgctgcggcccggcgcgacgatcaacggcggcgagacgcagatgggcatcccgttccgcaagggcaacccgaagttcgcgaaggcgctcgacgacgcgctcgcgtcgatgcgcgcggacggcacgctcaagaagatctcggtgcactggttcggcgtcgacacgtcggtcccgagcgcgcagtaa

SEQ ID NO: 1068 - DNA, 387 bp, Burkholderia pseudomallei
ttgttctattcgatcgtcgcgattttcgtcggcgccgggttcggcgcgttgctgcgctggttcctgagcatcggcctcaatgcgctcctgcccgaagtgccgctcggcacgctcgcgtcgaacctgatcggcggctatctgatcggcatcgcggtcgtcgcgttcgccacgcgtgcggggctgccgcccgaatggcggcttttcgtgatcacgggcttcatgggcgggctcacgacgttctcgacgtactcggtcgaagtgatgacgcacgcggtgcagggcgagttcggctgggcgctcgccgtggctgccctacacttgataggttcattcacgttgacggggcttggcatgtggaccgcgcgggcgtggctcgcgccggcctga

SEQ ID NO: 1069 - DNA, 639 bp, Burkholderia pseudomallei
atgagtctacgtcttggcgacatcgcgccggatttcgagcaggattcgagcctcggccgcatcaaatttcacgaatggctcggcaatagttggggcgtcctgttctcgcatccggccgactacacgcccgtctgcacgacggagctcggcttgaccgcgaagctcaagggagaattcgagaagcgcaacgtgaaggtgatcgcgctgtcggtcgacagcgtcgagtcgcacaagggctggatcgacgacatcaacgagacccaggcgacgagcgtcggctttccgatcatcgccgacggcgatcgcaaggtctcggaactctacgacatgatccatccgaacgcgaacgagacgctgaccgtgcgttcgctgttcgtgatcgatccgaacaagaaggtgcgcctcatcatcacctacccggcgagcaccggccgcaacttcgacgaagtgctgcgcgtcatcgattcgctgcaactgaccgatcactacaaggtcgcgacgcccggcaactggaaggacggcgacgacgtcgtgatcgtgccgtcgctgcaggatccggacgagctgaagcagcgctttccgaagggcttcaaggccgtgcgtccgtacctgcgcctgacgccgcagccgaacaaatga

SEQ ID NO: 1070 - DNA, 453 bp, Burkholderia pseudomallei
atgccatgtacggggcgcaattcgccctcgagaggcttcaccttaatcgaggtggtcgtcgcgatcgcgatcgtggcggtgctcgcggcgtttgccgtgccgtcgtatcgcagttatgtcgaacgggtgaaccgattgaccgcggttgccgcgctctatcgcgccgcgcaatacgtggacgcgttcggcgacgcgccgcccaccgcgttgccggaaggggtgaacagggcgcccgaatccggcaagctcgtctatgtgctgcggatcatgttcgacgacgcgcgcggcggatacgcactggaggcgcgtcccgccgccgatggtgcaatgcgggacgacagatgcggcgtctacgtgctgcatgcggacggcacgcgcgagaatcgcgtggccggaggcgtcgcgctcgatggcggtgcggcggagggcgatgcctgctggcgaacaggctag

SEQ ID NO: 1071 - DNA, 561 bp, Burkholderia pseudomallei
atgcgagcggagcgtgacaggtgggcaacggcgggcttcgtgctcgtcgaagtgatggctgcgctgatgctcgtggcgcttgccgcgatgctgaccgcgccgacgctcgccggcgctcgaatgcgcgatcgagtggacgcgcgggcgcgcgtgttcggcgcattgctcgcctatgcgcgcggcgaagcggtcaggctcggcgcgcgcgtggtgctgtgccgcagcgatgcgaccgcgaaatgcattgcggcggggcggccatgcggtggcggggcggccgattggtcgtgcggctgggccgtcgtcgccgcggatggcgaacgcggtacgcgcctgttgcggcgcattgcgcccgatgcccgagtggccgtgacgggcgcgactgtcgatgtcgtgttcacgccgcccgcgggccaggtgatcggcggcttccgaagtttcgagtttgcgccggcagacgcatcgggcgcatggcgcggggaacgctggcgccgctgcctgcgcatcgcggcgggtggtcgcgtgcgattcgccgagggcggttgcggagcgtcgacatga

SEQ ID NO: 1072 - DNA, 1953 bp, Burkholderia pseudomallei
atgggaaagatcatcggtattgacctcggcaccacgaactcgtgcgtcgcgatcatggaaggcaaccaggtcaaggtcatcgagaattcggaaggcgcgcgcacgacgccgtcgatcatcgcgtacatggacgacaacgaagtgctcgtcggcgcgcccgccaagcgccaatcggtgacgaacccgaagaacacgctgttcgcggtcaagcgcctgatcggccgccgtttcgaagagaaggaagtccagaaggacatcggcctgatgccgtacgcgatcatcaaggcggacaacggcgacgcgtgggtcgaggcgcacggcgagaagctcgcgccgccgcaggtgtcggccgaagtgctgcgcaagatgaagaagacggccgaagactacctcggcgagccggtcacggaagccgtgatcacggtgccggcgtacttcaacgacagccagcgccaggcgacgaaggacgcggggcgcatcgcgggcctcgaagtcaagcggatcatcaacgagccgaccgcggccgcgctcgcgttcggcctcgacaaggccgagaagggcgatcgcaagatcgcggtgtatgacctcggcggcggcacgttcgacgtgtcgatcatcgagatcgcggacgtcgacggcgaaatgcagttcgaagtgctgtcgaccaacggcgacacgttcctcggcggcgaggacttcgaccagcgcatcatcgattacatcatcggcgaattcaagaaggagcagggcgtcgatctctcgaaggacgtgctcgcgctgcagcgcctgaaggaagcggccgagaaggcgaagatcgagctgtcgtcgagccagcagaccgaaatcaacctgccgtacatcacggccgacgcgtcgggcccgaagcacttgaacctgaaggtcacgcgcgcgaagctcgaggcgctcgtcgaggatctggtcgagcgcacgatcgagccgtgccgcaccgcgatcaaggacgcgggcgtcaaggtgtcggacatcgacgacgtgatcctcgtcggcggccagacccgcatgccgaaggtgcaggagaaggtgaaggaattcttcggcaaggagccgcgccgcgacgtgaacccggacgaagccgtcgcggtgggcgcggcgatccagggccaggtgctttcgggcgaccgcaaggacgtgctgctgctcgacgtgacgccgctgtcgctcggcatcgagacgctcggcggcgtgatgacgaagatgatcaacaagaacacgacgatcccgacgaagcacgctcaggtgtattcgacggcggacgacaaccagggcgccgtgacgatcaaggtgttccagggcgaacgcgagatggcggcgggcaacaagctgctcggcgagttcaacctcgagggcatcccgcccgcgccgcgcggcgtgccgcagatcgaagtgaccttcgacatcgacgcgaacggcatcctgcacgtcggcgcgaaggacaaggcgaccggcaaggaaaacaagatcacgatcaaggcgaactcgggcctgtccgaagccgagatcgagaagatggtgaaggacgcggaagcgaacgcggcggaagaccacaagctgcgtgagctcgccgaatcccgcaaccagggcgatgcgctcgtgcacagcacgaagaaggcgctcaccgagtacggcgacaagctggaggcgggcgagaaggagaagatcgaagcggcgctcaaggagctcgaggacgtgctgaagaacgcgtcgagcgacaaggcggcgatcgacgcgaaggtcgaagcggttgcgacggcgtcgcagaagctcggcgagaagatgtacgccgacatgcaggcgcagcaggcaggcgccgcgggcgcggccggggcggcagccgaaggtgcgtcggcgcagggcggcgcgcagccggccgacgacgtcgtcgacgccgacttcaaggaagtgaagaaggactga

SEQ ID NO: 1073 - DNA, 390 bp, Burkholderia pseudomallei
atgccggagtcgccgaaccaatttccgccgtcgtaccagagcgcgaccgagagcgaacgccagcagtcgttgcgtacgctgacgcacatcctctatctgctgtacgcgattcactggctgacgggcggcattacgggcatcgtcgcgatcatcatcaactacgtgaagcgcgacgacgcggtgggcaccgcgtatcaggctcatttcgaatggcagatccgcacgttctggcgcgcgctgatcgcgtatctgatcggcttcgcgctgctgctcgtcgggatcggcttcatcgtgctgggcgcggtgtggatctggacgctgtaccgtatcatcaaaggctggctgtacttgaacgacaacaagacgctcgatccgcaggcatggttctga

SEQ ID NO: 1074 - DNA, 333 bp, Burkholderia pseudomallei
atgaccgttctggaactgaacgagctggtcaaggcgttcgaagagaagtttggcgtgtcggctgctgctgttgcagtcgcgggcccggcagccggcggcgccgctgctgcagctgaagagaagaccgagttcacggtcgttctggctgaagcgggcagcaacaaggttgcagtcatcaaggccgttcgcgaaatcacgggcctgggcctgaaggaagcgaaggacctcgtcgacggcgcaccgaagcccgtcaaggaaggcgtcgacaaggcttcggcagacgaagccaagaagaagctggaagacgcgggcgcgaaggtcgaactcaagtaa

SEQ ID NO: 1075 - DNA, 1191 bp, Burkholderia pseudomallei
atggccaaggaaaagtttgagcggaccaagccgcacgtgaacgttggtacgattggtcacgttgaccacggcaagacgacgctgacggcagcgatcgcgacggtgctgtcggcgaagttcggcggcgaagcgaagaagtacgacgaaatcgacgcggcgccggaagaaaaggcgcgcggcatcacgatcaacaccgcgcacatcgagtacgaaacggcgaaccgccactacgcacacgtggactgcccgggccacgccgactacgtgaagaacatgatcacgggcgcggcgcagatggacggcgcgatcctggtgtgctcggccgctgacggcccgatgccgcaaacgcgtgagcacatcctgctggcgcgtcaggttggtgtgccgtacatcatcgtgttcctgaacaagtgcgacatggtggacgacgcggagctgctcgagctggtcgaaatggaagtgcgcgaactgctgtcgaagtacgacttcccgggcgacgacacgccgatcatcaagggttcggcgaagctggcgctggaaggcgacaagggcgagctgggcgaagtggcgatcatgaacctggccgacgcgctggacacgtacatcccgacgccggagcgtgcggtcgacggcgcgttcctgatgccggtggaagacgtgttctcgatctcgggccgtggtacggtggtgacgggtcgtgtcgagcgcggcgtgatcaaggttggcgaggaaatcgaaatcgtcggtatcaaggcgacggcgaagacgacctgcacgggcgtggaaatgttccgcaagctgctggatcagggtcaggcgggcgacaacgtcggtatcctgctgcgcggcacgaagcgtgaagacgtggagcgcggccaggttctggcgaagccgggttcgatcacgccgcatacgcacttcacggctgaagtgtacgtgctgagcaaggacgaaggcggccgccacacgccgttcttcaacaactaccgtccgcagttctacttccgtacgacggacgtgacgggctcgatcgagctgccgaaggacaaggaaatggtgatgccgggcgacaacgtgtcgatcacggtgaagctgatcgcgccgatcgcgatggaagaaggtctgcgcttcgcgatccgcgaaggcggtcgcaccgtcggcgccggcgtcgtcgccaagatcatcgagtaa

SEQ ID NO: 1076 - DNA, 678 bp, Burkholderia pseudomallei
ttgaaaacttcgaagacagttctggcgtgcctcgcggcatcggccatcgtcgcattgtccggctgcgcgaccgaggcgtcgcgcacgctgcccgtgccgccgtcggcgagcgcgcagaagccgttcgccggcaagccggtcggcatcgcggtcggcaagttcgacaaccgttcgagctacatgcgcggcatcttcaccgacggcgtcgaccgcctgggcggccaggcgaagacgatcctcgtcacgcagctccagcagagccgccgcttcaacgtgctcgatcgcgagaacctcgacgagatcaagcaggaagccgcgttcatgaagaaggcgcaggcggtgaagggcgcgaactatgtcgtgacgggcgacgtcaccgagttcggccgcaaggaagtcggcgatcagcagctgttcggcattctcggccgcggcaagagccagatcgcgtacgcgaaggtgaatctgaacatcgtcgacacgacgacgtcggaagtcgttctgtccagccagggcgcgggcgaatacagcctgtcgaaccgcgagatcatcggcttcggcggcacggccggctatgactcgacgctcaacggcaaggtgctcgatctcgcgatccaggacgcggtcaatcacctcgtcgaacaggtcgacgcgggcgcgctcgcgtccggcaagtag

SEQ ID NO: 1077 - DNA, 318 bp, Burkholderia pseudomallei
atgcatccgatcgtaaggcgtctattgctcgtcgctgttttcagcccgctctcggctgcggcgttcaacgaggagcaggggtacaaccaatgcatcctcaatgcgttgcgaggaagccggaatccgaccgcgacaggcctcatgcgcaatgcatgtgaccagctctatcgaaactgggcgatgcttcagccgcgcgatcgcgcctatcacacgtgcattctggatagcctcggggacgtgaaggacacttacgccgtgcagcaactcgccgcggcctgttctcgacagagcgaaggcgcaggccccacgttcaagtag

SEQ ID NO: 1078 - DNA, 1395 bp, Burkholderia pseudomallei
atgagtactgctgctttggtagaaggcaagatcgtacagtgcatcggcgccgttatcgacgtggaattcccgcgcgagagcatgccgaagatctacgacgcgctcattctggaaggctcggaactgacgctcgaagtccagcagcagctgggcgacggcgtggtccgtaccatctgtctgggtgcctccgacggcctgcgccgcggcgtcgtggtgaagaatacgggcaatccgatttcggtgccggtcggcaagccgaccctcggccgcatcatggacgtgctcggccgcccgatcgacgaggcgggaccgatcgagagcgaaaacaagcgctcgatccaccagaaggcgccggcgttcgacgagctgtcgccgtcgaccgaactgctcgaaacgggcatcaaggtcatcgatctgatctgcccgttcgcaaagggcggcaaggtcggcctgttcggcggcgcgggcgtgggcaagaccgtcaacatgatggagctcatcaacaacatcgcgaaggagcacggcggttactccgtgttcgcgggcgtgggcgagcgtacccgtgaagggaacgacttctaccacgaaatgaaggactcgaacgttctcgacaaggtcgcgctggtgtacggccagatgaacgagccgccgggcaaccgtctgcgcgtggcgctgacgggcctcacgatggccgagcacttccgtgacgaaggcctcgacgtgctgttcttcgtcgacaacatctaccgtttcacgctggccggtaccgaagtgtcggcgctgctcggccgtatgccgtcggcagtgggctatcagccgacgctggctgaagaaatgggcaagctgcaagagcgcatcacgtcgacgaagaagggctcgatcacgtcggttcaggccgtgtacgtgcctgcggacgacttgaccgacccgtcgccggccaccaccttcggccacttggacgcaaccgtcgttctgtcgcgtgacatcgcatcgctcggtatctatccggccgtcgacccgctcgactcgacgtcgcgccagatcgacccgaacgtgatcggcgaagagcactactcgatcacccgccgcgttcagcagacgctgcagcgctacaaggaactgcgcgacatcatcgcgattctgggcatggacgagctgtcgccggaagacaagctgtcggttgcgcgcgcacgtaagatccagcgtttcctgtcgcagccgttccacgtcgccgaagtgttcacgggctcgccgggcaagtacgtgccgctgaaggaaacgatccgcggcttcaagatgatcgtcgacggcgagtgcgaccacctgccggaacaggcgttctacatggtcggcacgatcgacgaagccttcgagaaggccaagaagatccagtaa

SEQ ID NO: 1079 - DNA, 1953 bp, Burkholderia pseudomallei
atggtcgaaacgagacgcatccacgttgtgctcctcgccgcggcgatcacggcgatcacggcgatcgccgcgatcgcgccggccggtcacgcgcaaaacgccaccgactggctggcgaacacctacggcaccctcgccgcccacgtgggcaacaccgcgcgttcgatgtgggtcgcgcccgaaggcgtcatctacacggcctcgatgtgggacgaatacgagggtggcgtcgcgatctaccagaacggcaagagcgtcggttcgatcggctcgcacgcggagtttcagggcggcgcgatcacgggcaacgcggcgtcggtcttcgtcgcgctccagtacgacaagtcgcacggcagcggcgcggtcgggcgatacaaccgcgtgaccaaggcgcgcgagctgtcgattcaggtcagcgcatcgaccgatcagccccgggtcgacgtcgtcaccgggctcgccaccgtgggctcgctcctctatgcgagcgacttctacggcaatcgcgtccgcctcttcacgaccgacggcgtctggcagcgcgacatcggcgtggcgggccccggcgcgctcgccgtggatcgcgcgggcaacgtctgggtcgcgcgcaagcgcgcgggcgagatcgtcgaattcagcgcggccggcgcgttgctgaacaccctccggatgcccggcggatcgcagccgtcggcgctctatttcgacgcgccgtcggggcaactgatggtcggcgacgaggggccggacatgaacatcaagcgctacgccgtcacgggcgcgccggcgctcgtcggcacattcggcattcagggcggctatctcgacacgacgacgggaatcaaaggccaggtgggcgcgaggcgcttcacgcgcgtcgccggcatcggcaaggacgccgccggcaatctgtacgtgctcaacaacccgtggggcggcagctgggacctcggccgcaacggcgccaccgacattcacgcgtacgacagcgccggcaacctgcaatggacgctccagtccctgaacttcgagggcatcgccgcggcggacccggctacggacggcgcgctgttctacggcggcacccatatctacgccggcagcgccggcggcacgttcgtcgcgaacaccgtcgatccgttctcctatccgtcggacccgcgcatcgacatgaacgatacgcagcgcgacgagcatttcgggcaactcgtcgccgtcggcgcgaaccggattctcgtggcgtcgggccagaatccgccgatcttctactttttccatttcaacaaggcgaatggctacgtcgcgattccggacgcgtcgctgccgggcgcggcgttcaatacggcccagcgggtcacgagcggcttctgcatcgacagcgagggcggcgtgtgggccggcctcgagaagaccggcgcgatctaccactacccgctggccggcttcgacgcgagcggcaagccgacatggggcgccggcgtgccgacccgcattccggcgagcattcagccgctgacgcgcatcgtctacctcgcggagagcgacacgatgattctcgcgcaaggcatcgtcggcagcgccgattggacctcgatcggcacgcgaatcgaggtgtatcacggctggcgcgcgggcaacaccgccgcgcccgatccggtgatcacgctcgccaacgccggcgcgaagtcgatcgacgcggccggcaaccatctgttcgtcggctactggttcggcggcggtgggccggcgcggccgaacgtcgatgcgttcaacctcgccacgggcaagcttgacgccacgctcgtcaacaccagccgcgccaccgtggacgcgagcagcgccgtcgattcgatgtacggcgtgcgggcctatcagcgatcgacgggcgagtacgtggtgacgaagaacaacgtcaagggcaacagcatcaccgtgtatcgctggaagccgtga

SEQ ID NO: 1080 - DNA, 573 bp, Burkholderia pseudomallei
atgattgagatgaatgggctgaaattcaggagaggcgcggcgcgccgatggccgtcgatcgccgctgccgcaatgttcgcggcttcggcggcctgcggcgcgccgccgtcgccgaccgtgacgatcaaattcaagggaagctacaacccggtgacttgcacggtcgtggagggcaacgagaacaaaacggttcacctgccgacgatttcgacgtcgtcactggcgaatgcgggggaaaccgccggcgcgaccgggttcgacatttccgtgctttgcgacggatacgcgggaaacgtgctggcctatttcgagaacggaccgacgaccaacgagaacggcaatctcgacgtcgaggacccgagcgacggacagagcgcctccggcgtgcaggtccagctcctgaacggtgacggctcgcctatcaaggtcggcgacatatcgacgatgaagacggtgtccgtcgaagcgtcgacgcctacgccgattcccttcttcgcgcgctactacgccaccgggaagtccggtgcgggcaaggtgcgaacctatgtgaccttcgtgatccagatgctttga

SEQ ID NO: 1081 - DNA, 648 bp, Burkholderia pseudomallei
atgaaaccaaaaatcacattttacgcaatttcaattatcatcgcgcaactttggtcggctaatattcaagccgatacaccaaacttggatctcatggtcaagggcacaattgacgtgccgagctgcactgtctccgttgcgaacaacggcatatacgattacggaaagatcttgccgacgataataacgagcggcacgggtcataccgatctcggaaaaatgacaaaagcttggtccgtaaattgcgatgccaacaccttcatgactttcaaggtaacagacaatcgcagcgaatctgccagcgtttcatcgcacgacagtaggacgttgaatacgttcggccttggcatggtcaacaaaacaggcaagctaggctactacacgattaaaatgacaaatcccaccgttgacggcgaagcaacgaaattatttaatactttacagaccagcgacacggacatctatgtccgtcattcggatataatccaaggttgggggtcgccgaatagtcttgctataggcagagattttacggccgacctgacagtcaatgcctatctggctggaacaagcatcatggcgggtccgctcaccgaatcgatcgacctggatggctcgacaactttgtcattcgctttcggcctataa

SEQ ID NO: 1082 - DNA, 657 bp, Burkholderia pseudomallei
atgaagctgaaaacctctcttctcgcgctgtccatcgccatgctcggtacgacggcggctcatgctgccgcaccgactcaagatctcatcgtcaagggctcgattgatgtgccggcctgtaccgtcgttgccgccgacaatggtgtgtacgactatgggaaaatctctccgacgctcatcaagagcggcacggcgactacgccgcttgccaagatggaaaaggcatggaccgtgaactgcgatgccgaaacgtatatgagcttcaaagtgacggacaatcgcagcgattcggcgagctccggcgacaacacggcatttggcctgggtaaggtcaacgagaccggcaaattgggttactactcggtgacgatgcaagatgcgcaggtagacggcaaaaaggcgcgagtgtatgcaacgcccagcacgtctctcggtggtacgggagttgtcgccacgtatcaaaaactgaataagctcccgagctacacgcatgggtgggcaaacgagagctccgcgacgcaactcgcaggcaagaatttcactgcgaacatggtcgtcgaagcggttctcgccggcaccgaaacgatgggtggcgcgctaaaggacgcagtcgatctggacggctccgcaacgctgactttcgcgttcggcctctaa

SEQ ID NO: 1083 - DNA, 948 bp, Burkholderia pseudomallei
atgttggagatcaagcacaagctcgttcagaccgccgccgcgtgcgcgctcgcgttcgccgcgtgcgccgcgcacgcggccgacaaaccgctcaagtcgatcggcatcaccgtcggctcgctcggcaatccgtacttcgtgaccgtcgtgaaaggcgcgcaggcgcaggcgaaggaaatcaatccgagcgcgaaggtcacggcggtatccgccgattacgatctgaacaagcagttcacgcagatcgacaacttcatctcggcgcacgtcgacatgatcctgctgaacgcggccgacccgaaggcgatcgagcccgccgtgcgcaaggcgcaggcggcgggcatcgcggtgatcgcggtcgacgtcgcggcgtccggcgcggacgcgaccgtgcagacgaacaacgtgaaggcgggcgagctcgcgtgcgattacctcgcgaagaagctcaacggcaagggcaacgtgatcatcgagaacggcccgcaggtgtcggccgtcgtcgatcgcgtgaacggctgcaaggcggtgctcgcgaagaatccgggcctcaggctgctatcgagcgaccaggacggcaagggctcgcgcgaaggcggcatgaacgcgatgcagggctacctcacgcgcttcccgaaagtcgacgggctcttcgcgatcaacgatccgcaggcgatcggcagcgatctcgccgcgaagcagttgcgccgcaccggcatcgtgatcacgtcggtcgacggcgcgcccgacatcgaaaccgcgctgacgagcgacacgcaggtgcaggcgtcgtcgagccaggacccgttcgcgatggcgaagaaggccgtttcggtcggctacggcatcatgaacgggcacaagcccgcgaacgcgatgatcctgctcgagccgacgctcatcacgcgcgagaacgtgaagcgctacaagggctggagcgcgcattga

SEQ ID NO: 1084 - DNA, 639 bp, Burkholderia pseudomallei
atgtccgaagatcttcgcgtcggtctttttccggttcgctatctcgtcggcaccggcttgcccggcgcgccgcagctcgtgctggatctgatggtcgacacggtcgatcacagcgtcgtcggccgcgcggcggtctcgcaagccgtgagcccgccgctcaatttccacgccgacgtctggggctcctacgtattccggctcggcccgccgccgcgccgcgacggcagcggcgcgatcgtgcagatctcgctgcagggcaaccagggcgggccgcagtcgaattcgatgatcacgttctacggcgagctgctgctcaagggcgacggcaagacgggcgtcgcatcgtaccgctactactcgaacggctcctggcacgaagtcgagaacgtgccggtcaaggccgacccggagctcgtgccgatcgagccgggcccggtcatcggccaatcgtcgatgagcgcgatcggatcggccgcgatgtacggcgtggcgatccagtctgcggccgcttccggcgatctcgcgcacatgcgcacgctcagtgcctatgcgcggcagcagctggaaagccgtgacgaaatcgcggccgcgctgagcgagctgaaggcggaaatcgccaagctcgaaagccggcagtga

SEQ ID NO: 1085 - DNA, 1422 bp, Burkholderia pseudomallei
atgacaaccaaccaacgagaatccactgtttctctgcggcgcgcttgcgcgtcgctagccgcgctggcgctgcttgcggcctgcacgtcgacgcccgaggcgatccagcgcaagacgggctggatgcgcagcgaagtcgccgattcctatatctacgcctacccgctcgtgctgatggacgtcgcgaaggaagccgcgacggccgacggcgcgcccgtcaacacgctgcgccacgcgcaggcgctgcccgcgccgggcgccgcgaacccgccgctcgcgagcgtcgacatgctcgattcgaccgcgtggctcgacgttgccgacgagccggtgatcgtcgcgctgcccgacgggcgcggccgctatctcgacgcgcgcgcgctcgacatgtggaccaacgtgctgtggtcgaccggcccgtcggcgaatccgcgctcgggcgcgagccgcgcgcgcacgctcgcgttcgtcggcgcgggctgggagggcacgctgccggaaggcgtgacgcgcgtcgacgtgcccgcgcgcaacgtgtggctcgacgtgcggatccagacgagcggcgggcgcgatctcgccgccgcgaggaaactgcagcgcgcgattcgcgtcgagccgctgtccgtctatacgggcgacgcccgcggcgcgcgtgcggatgcgggcgcagcgtcggccgagcccgcatcgggcgccgccgcgtcgcctgtcgcgcaggtcgcggcgctcgatccgccggcgttcttctcgcgcgtcgcgcgcgcgctgcaggacaacccgccgcccgccgccgatgcgcacgcgcaggaaatcctcgccgacatcggcgtgacggcgggcgcgccggtgcaatggaagggcgacaagctgatcggcgccgagaacggcgcggccgaggcgcgcgagcggctcaccgcgctgccgccgaacgcgctttccgcgaacggctggagctggctcggcgacagcgtcggcaactacgggcaggattacgcgttgcgcgcgtacgcggcgtcgacgcaattcggcgcgggaacgcgcgacgacgaaaccgtcgccgtcgtgaagaccgacagcgcgggccggccgctcaacggcgcgcaccgctacgtgatccgcttcgcgccgaacgcgctgccgcccgcgcgcgcgttctggtcgctcgcgccgtacacgccggacggcgcggtgcccgagctcggccgcgcacgccgctcgatcggcgagcgcgaccggctgcgccgcaaccgcgacggctcgctcgagatcgtcgtatccgcggcgccgcccggcaaggggtacgcgtcgaactggttgcccgcgccgcgcgccgatttcgagctcgcgctgcggctctacgcgccgaagcggcaggccgccgacggcacctggcagccgcccgccgtcgtccgcaagtga

SEQ ID NO: 1086 - DNA, 1200 bp, Burkholderia pseudomallei
atgaaaaaagcggcagcagcatggttggtggcggggagcatgtgcgccggcgcgcacgcgcaaggcacggtgacgctctacgggatcgtcgacgcggggctcggctatacgagcgaccagcgcgtcgcgcagaccaagggggcgctcggctcgcccgtcggctaccgcaatgagtcgagctacggcttcgcgagcggcacctggtcgggcagccgctgggggctgaagggcaaggaggagctgggcggcggtctcgcagccgtgttccagctcgagaacggttttaacatcggcaccggacaggcgggacagggcgggcgaatgttcggccggcaggcgtggatggggctgtcgagcgaacgctacgggacgctcacgatggggcgccagtacgatccgatcgtcgacttcgtcggcacgatcggcgcgggcgcgttcctgaccggcatgggcgcgcatccgggcgatctcgacaacatcgacaatcaggcgcgcgagaacaactcgatcaagtacgtgagcccgaagttcggcggcctcgcgctcggcgcgctgtacggcttcggcaatcaggcgggcagcgtgaagaaccagaacacgtggagcgtgggcggccagtatgtgaacgggccgttctcgctcggcgccgcgtacctgtatgcgacgaacgcgtacggcgcgaacggcggcgcgtggacgggttcgtacgacggcacgttcgcttcgtcgatcaacgaaggcttcgcatcggcgaagagcatgcagatcgtcgcggcggcgagcacctatcagatcggcgcggtgacgctcggcctgtcttacagcaacacgcggtacaaatccggcgcgttctcgacgttcaacggcaccgcgacgtacaactcgatcggcggcaccgtatcgtggcaggcgacgcccgagctgcgcgtcgcggcgggctatgatttcacgcgtggcagctcgatcgacggtcagtccgcgccgaaataccatcaggtgaacttcgcgtcgtactactacctgtccaagcgcaccgcgctgtatggcctcgtcggttatcagaaggcgagcggcaagacgctcgatgcgtacggcaacgtcgtcgcggcgacggcgtcggtcggcgacgtcggcaacggcatttcgtcggcgggcgatacgcagacgctcgtgcgcatcggcgtgcgtcacacgttctga

SEQ ID NO: 1087 - DNA, 426 bp, Burkholderia pseudomallei
gtgcggcaccgggcgggcttcaagcatcacgtgaagcgcggcgagcaccctacggcaactgcatcggatcgcgagcattacgccgagttcggcgacaagatgagcgccgacgacgcgaagcacgtcgagacggaatcgatcgaggcggccgtgttccgcaaggccgtatgcgccggcttcgatcacaagagggtcgccctcgcgttgatgaagcgcggcgggcgcagtgccgccaaccgccgcacgccgacatgccaatcgggcatggcggccgattcgcggaatattggagaagcccggtgtgctcgacggctttgctcacaatcgctcctgtttccatgtccacgtggtgcacttgaaacagagactttgcaaggtcaatcgatagtgacgaactgcgcaggtggagcctaccagttcaggtag

SEQ ID NO: 1088 - DNA, 1353 bp, Burkholderia pseudomallei
atggacatcatccgccccacgttcgcgccggacgccgcgcgaagcccggacgccatccgcgcggaaatcgccgcgctggttcgagagtatgcgaacgcgacgcaggcgcgcgctccgttcgtgccgggccgcacgcccgtgcccgtgtccggcaaggtgatcggcgcgccggaactgcagcacatggtggatgcgagcctcgacggctggctgacgacggggcgcttcaacacggccttcgagaacaggctcgcgcgctatctgggcgtgacgcacgtgatcacggtgaactccggttcgtcggcgaatctcgtcgcgttctcgacgctgacctccgatcgcctcggcgagcgggcgatccgccccggcgacgaagtgatcggcgtggccgcgggattcccgacgacggtcaatccgatcctgcaattcggcgcggtgcccgtgttcgtcgacatcgaactcggcacgtacaacgtcgacgcgacgaagctcgaagcggcgctctcgccgcggacccgggcgatcatgctcgcacactgcctcggcaacccgttcaacgtcgaggccgtgacctcgctgtgccgcaagtacgggctctggctgatcgaggactgctgcgacgcgctgggagcgcggtacgacgggcgactcgtcggcacgttcggcgacatcgcgacgctgagtttctacccggcgcaccacatcacgatgggcgagggcggcgcggtgttcaccaataacgacgagctcgcgcgcatcgccgaatcgttccgcgactggggccgggattgctactgcgcgccgggtgccgacaacacctgcggcaagcgcttctgctggcagctcggcgagctgccgcgcggctacgaccacaagtacacgtacagccactgcggctacaacctgaagatcaccgacatgcaggccgcttgcgcgctcgcgcagatggatcgcgtcgacggcttcatcgagcggcgccgcggcaacttcgcctacctgaaggagcggctgtcgtcatgcgatgcgttcctgcatctgccgcaggcgacattcaattcgaatccttcgtggttcggctttccgctgacgctgagggaggacacgggcgtcgcgcgggtcgatttgctcgattacctgagccagggcggcgtcggcacgcgcctgctgttcgcgggcaacctgacgcgccagccgtacatgcggcatcggcggtatcgcgtgagcggcgagctggcggtcacggacgccgtgatggagcgcacgttctggatcggcgtctttccggggctggacgaagcgatgctcgattacgcgtgcacgaagatcgagacgttcctgggcatcaacttttga

SEQ ID NO: 1089 - DNA, 1665 bp, Burkholderia pseudomallei
atgacggcgcgcttcgtttccctccggatcggcgcggcggcggccgtactggcgttcgccgcgggctgcacgacattctcgcgggacggcggcttcggcgccgtgtcgagcgcggccgccgagcggctcggccaggacgcggtgctggtgaagaccgacgccgatcgcgatgccgtggcgcgtcgcacgcaggcgctgctgtcgaagccgctcggcatcgacgacgcggttcagatcgcgctgctgaacaaccgcggcctgcaggcttcgtatgcggagctcggcctgtccgaggccgatctcgtgcaggcgggacggctgccgaaccccggcttcacgttcagccgcacgcattcgagcaacgacctgagcatcggccgcacgttctcgatgagtgtcctgagcatgctgacgctgccgctcgcgacgaagatcgaggggcggcgcttcgagcagaccaagctcgagaccgccgacgcgatgctgaaggtcgcggccgacacgcgccgcgcgtacgtcgaggcggtcgccgccgcgcaggcggcgacctacgcggagcaggtgaaggattcggcggacgccggcgcggagctcgcgctccggatgcggcgcgccggcaacttcagccggctcgattacgcgcgcgagcaggcgttctacgcggacgcggtcgcgcagctcgcgaacgcgcggctgcgcgcggtcgccgcacgcgagaagctcacgcgcgcgatggggctgtggggcgcgtcggccggctatgaactgcccgagcgcctgccggagctgccggccgaacggccgcggctcgacgacgtcgagcgcttcgcgatggaccaccgcctcgacatccgggccgcgaagctgaggacgcagggcgtcgcgagctcgctcgggctcacgcaggcgacgcgcttcgtcaacgcgctcgaactcggctacctcgacaactacgagaccgacaaggggcacgagcacggctacgagatcagcgtcgagattccgctgttcgactggggcggcgcgaaagtcgcgcgcgcgaaggcggcctacctgcaatcggcgaaccggctcgcgcagacggcgatcgacgcgcgctccgaagtgcgcgaatcgtacgcggcgtacgtgacgcgctacgacatcgcgaagcactatcgcgacgaggtcgtgccgttgcgcaagacgatttccgacgagatgctgctgcgctacaacggcatgctcgtcagcgtgttcgagctgcttgccgacgcgcgcgatcagatcggcgcggtgaacgcctatatcgatgcgttgaaggactactggctcgcgcaagccgatctgcagcaggcggtgggcgggcgtttgccgcgcggcgcgcaggcggccagcgagccgccggcggcgacgccggcttccgcggccgccgccggcgcgcgcgccgcggcggtggcctcgggcgcggcggcgccggcgagcgaggccacgtcggtgtcgtcgtccgcgtccgtgtccacatccgcgtcggcgtccatgcccgcaaccacgcccgcatccacggcagcgtcggcccccgcgctcgcatcgcctcgcgcgatcgcgacggcggtctcctcccacgcgcacgagccggcttcgttatccggcgccgtgccactcacgaattcgaaaggtcaatga

SEQ ID NO: 1090 - DNA, 1122 bp, Burkholderia pseudomallei
atgagtgtgagccatcttcgtcatgcggtcgcgcgcgcagcgctcgtcgcgctcgccggcgcgtcggcgctcgccctgccggccgcgcacgcggccggcgccgagctgaacgtgtacaactggtcggactacatcgcgaaggacacgatcccgaacttcgagaagcaatccggcatccacgtcaagtacgacaactacgacagcgacgacacgctgcaggcgaagctgctcgcgggcagctccggctacgacatcgtcgtgccgacgtcgaactacatggccaagcagattcaggcgggcgtctaccagaagctcgacaaatcgaagctgccgaacctgtcgaacctcgatccgacgctgatgaagatgatcgccgacgccgatccgggcaaccagtacggcgtgccgtgggcgttcggcaccgacggcctcggctacaacgtgcaggcggtgaagaaggcgctcggcgagaacgcgcccgtcgacagctgggcgctcgtgctcgatccggcgaacgtatccaagctcaagggctgcggcgtatcgttcctcgatcaggcggtcgacgtgttcgccgcgacgctacaatacatgggcaggaatccgaacagcacgaacccggccgattaccaggcggcgttcgaggtgctgaagaaagtccgcccgtacatcacgcaattcaactcgtccggctacatcaacgatctcgcgaacaacgacgtatgcgtcgcgctcggctggtcgggcgacgtcggcatcgcgcatcgccgctcggccgaggcgaagcgcccgtacgacatcaagttctcgaatccgaaggaaggcggcctgctgtggttcgacgtgatggtgatcccgaaggatgcgccgcacgcggaagccgcgctgaagtggatcaactacatcgaggacccgaaggtcaacgcggcgatcaccaacgaagtgttctacccgagcgcgaaccgcgcggcgcgacagttcgtcgtgcccgccgtcgcgcaggacccgaccgtctacccgcccgaggacgtgctcaagaagatgacgctgatgcggccgatgcccgccgacatcctgcggctcgagaaccgtctgtgggcgcaattgaagacgggacactga

SEQ ID NO: 1091 - DNA, 1665 bp, Burkholderia pseudomallei
atgcattcgatgtcgaaccctcgcttacgcttttcctccgtcgtttacggcctcatcgcgctcgccgcgtgtgcaagcttcgccgcgcatgcgtcgggcgcgcgatgcgcggcatcgcccgcgaagtccgccgacggcacgccgcaatggcggcccgcgttgcactacacgccccgacgcaactggatgaacgacccgaacggcctcgtctacgaaaacggcgtctatcacctgttctatcaatacaatccgcacggcaacttctgggacgacatgtcgtgggggcacgcgacgagccgcgatctcgtgcactgggacgagcagccggtggcgatgccggcgaacgcgcgcgaggatatcttctccggctccatcgtcgcggacgcacgcaacacgtcgggcctcggcaccccgaatgcgccgccgctcgtcgcgctctatacgagcgtctacaaggcgggctccggccacgaacccggtacgcaggcgcaatcgctcgcgtacagcatcgatcacggcaagacgtggcggccgtacgcgcacaatccggtgctgacgctcgcgcccgaatcgcggcatttccgcgatccgaacgtgacgtggtacgcgccgggcggctactggatgatgacggcggttgtcgccgacgcgcccgtcgtcaagctgtatcggtcgagcgacctgattcgctgggatttcctgagcgacttcacgctgcccgacgtcccgcatcgcggcgcgctgtgggaaatgcccgagctgctgccgatgccgctcgacggcgacgccgcgcgcatgaagtgggtgatgatcgtcaacgtcaatccgtggtcgatcgcgggcggctcgggcgcgatgtatttcatcggcgagttcgacggcagaacgttcacgcccgatcgcgccgcgccggcgaacgccgatcccgcgcaatactcgtggctcgatcacggtgccgactactacgcggccggcacgttcgcgaacgcgccgggcgaggggccggtagcgatcgcatggatgagcaattgggactatgcggagcgcattccgaccacgccgtggaaaggcgcgatggcgttaccgcgcgagcttgcgctgaagacgatcgacggccggccgcgagtgacggtcgcgcccgcgcgcgcgttcgacgcgttcgcccgcacgcggcccgccgtgcgtatcggctcgctcgcggtcgcgtccgcgacgcgagagctcggcgccgacgcacgcggcaccgtgcagcgcatcgcagtgacgatcgagccgcgctcggccaggcgcgccggcttgatcgtgcggcgctcggcgaacggccgcgtcggcacgcgtatcgtctacgattcgtcggcgcacacgctgagcgtcgatcgctcggcatccggcgaaacgaacttctcgaacgcgttcagccagcggcatatcgttgcgctaccgctcgtgaacgggaagctgcggctcgacgtgatcgtcgatcgcgattccgtcgaagtgttcgacggcgacggccggaccgtcatcaccgatctcgtgtttccgtcgcctgccgacaaccggctcgccgtgttcgccgaaggcggcgacgcgacgttcggcgatgtcgtggtgacgaatctcgacgagaccgcgggcgagcggcgagggtgcccgacctcatag

SEQ ID NO: 1092 - DNA, 1704 bp, Burkholderia pseudomallei
atgcagacatcccgtaaagcactgccgctcgcgctgggtcttgccatcggcctcggcgccgcgctgcccgcgtgggccgattcgaaggcaccgagcccgcaggaggaaagccggcgcgcgagcctcacgcgcggcgtcgtggcgcctgcggaacaggccggcaagaccgggcagttccgccccggggccgttgccgtgacgctggcgagcccggcgtttcatgcgaagaaggccgatgcggcggcgatggcgcgcgagtacgtcaccgcgcgcgcagcgcagctcggcctcgacaaggccgcgctcgcgaatctcgtcgtcgcgtccgaacgcgccgacgccgcgttcaccgtcgtgcgcttccagcagcgcgccgcggggctgcccgtctatgacagcgacatcgcggtcacggtcgcgccggacggccgcgtgctgtacgtcgcgagcaaggcggtgagcggcgtcgcggccgtgtcgagcaagacgcaggcggtcgacgagcagcaggcgctcgaccgcgcgcgcgcctacctcggcgtcggcggcttcgtgaacgtgcagtcgcagctcgtcgcattcgtcgacggcgcgggcacacataccgcgtggaaggtgagcggcaggccgcaggacagcctgcacggcgactgggagctgatcatcgacgcgggcagcggcgaagtgctgcgcgcgcaagacaaggcatcctacgcaacggacggcagcgggctcgtgttccggccggatccgttgtccccgacgaaaagcagctacggcagccccggcttcaaggacaacaacgatgcggactcgccgcaactgagcgccgcgcgcgtgcgcgtgacgctcaaggatctgacgcagacgagcggcggctacaagctgagcggcccgtatgcatcgtgcatcgatttcgatgcgccgctcgacaaggcgtgcccggttcaggcgtcgacgaccttcgatttcacacgctcgaacctctatttcgaggcggtgaacgcgtattaccacatcgacacgttcctgcgctacgtgaacctgacgctcggcatcaaggcgttgccgtaccagtacgcgggcggcgtccagtacgatccgcacggccaatccggcgacgataactcgtcgtactcgccgagctccggcaggttgtcgttcgggcaaggcggcgtcgacgacgcggaagacgcggatgtcgtgattcacgagctcggccacggcattcacgactggatcaccaacggcggactgtcgcaggtcgagggcctgtccgaaggcacgggcgactatctcgcggccgcatacagccgcgacttcaaccaatggagcccgtccgatgcgcagtatcactgggtcttcaactgggacggccacaacgaattctgggccggccgcgtcaccaattacaacgtcggccgcacgtacgcgcagatccgcaatgccgcgatccacaccgccggccagtactgggcgtcgtgcaacatggtcgcgcgcgatgcgatcggcggcgcggcgatggacaaggcgttcctgaaaggattgtcgatgacgaacggctcgacgaaccagaaggccgcggcgcaggcggtgctgaccgcggcggcggcgctcggctacagcagcgcgcagctcaatgcgatcggcgacgcgtacaacaagagctgcacgtacggcgtgaccgtgccgcagaagctgtaa

SEQ ID NO: 1093 - DNA, 1515 bp, Burkholderia pseudomallei
atggacgcatcgctgcgatcgcgctggcgcgccgtccaccggggcgcgggcgcgctgttcggcatcgtgctgttcgtgatcctgttcacgggcacgtggagtctcgcgcaggaatcgatgcagggctggtggcggccgccgtcgcttgccgtcgccgggccgccgctgccgctcgagcggctcgccgcgcgcgcggcgtcgctcggctttgcgctgcgcgacgcgcgcatcgtgctgccgcagccgaatgatccggcgatccggttctgcacggcgcggcacgcctgcctcctcgcgctgaacccggcgacgggcgagccgctcgcgcacgcggcgcgcgccgcgctgctcgtcacgctgcacaggacgatgttcaccggctttcccggccggatcttcgtgagcttatggggcgtcgtgctgctcgtgctgatcgccgccgggctcgtgttgcaccggcgccgctggcccgatgcggcgcgcgtgcggcgcgaccgcggcgcacgcatcgcgtgcttcgatctgcacggatggatcggcctctggggcgcgccgtggctcgtgctgttcgcgttcacgggcgcgctgtccgggctcggcgcgctcggcacggtatcgctcgcgccggcggcgttcccggggcagccgcaacgggtgttcgcgcagctgatgggcgcgccgccgcccgcggcggccggccggccatggtcacgcgcgccggatctcgacgcgctgctgcggcgcgacgccgcgcgcgcgccggcttttcgggccgaagtgctcgcgctgcatcactggggcgatgcgaacgcgagcgtcgaaatcgccggcacggcggcaggcttgccgagcacggcgctgttcgagcgccatctgtatcgtgcggccgacgggcagtggctcgcggacgccacgtcgcgcggccggggcgtctggctgcgtgcattcatcgcggttcagccgctgcatgtcgcgcgctacggctgggccggcacggcgggcggcggcctgcgcgcgcttcatttcctgatgggcgtggccgcttgcgtgctgtgcgcgacggggctcttgctgtggatcgaacgtcggcacgcgcacggcgacgcccgtgcccgcgcgctcgcggcactcggcgcgggcgtgtgcggcggcctcgtgctcgcgggcggcgtgctgctgttcgcggggcgcgtgctgccgcccggcgcgcgcgccgacaccgcgctcgccgcgctgttctggtcgacctggctcggcagcgcgctgctcgccgcgcgcgtgcgcgatcgcgcggcgctcgcgcgcgggttgatgggagcggcgggcgcggcgtatctgctcgccggcgcagcgcacctgtcgatcgcgctgctcgaggcgggcacgcccgtctacgggcacgtcgacgccgcgctcgccggcctcggcgcgctgctgctgcgtgcggcgcggcgtggccgccgcgtcgcgacgctgtccgccggcgtgccgccgccgcattccgaacttctttga

SEQ ID NO: 1094 - DNA, 396 bp, Burkholderia pseudomallei
gtgaataagccatatcgaacaatttggaatgcatcattgggcgcgtgggtcgctgcttcagtgattgctagaacatgcgggagacccggctcgaccaggacgatcttggtcgtaacggtcgcaatggtaggagcatctggagcgtatgcgcagtatgtcgctggtggtggttcgcaaactgaacagccgggtggaaagagggatatctcaaccagcgccaacgattctgctcttctctcgaatgcgcgaggaggggactcgggagcaaatggttcttctgctcgaggaaatgggactgcggatgagaacgggagggcgtatatcggcatgtcgaccttcctgggtcagaagacgatggcggctgacatgcaaggcccgtttcacggaaaaccttaa

SEQ ID NO: 1095 - DNA, 1203 bp, Burkholderia pseudomallei
atgaaaaagcgcactgcggtcgcgatgacggccgccggactggcggctgtcgccaccgcgcacgctcagagcagcgtgacgctttacggcatcgtcgataacggcatcgcgtatcaaagcagcagcacgtcgctcggctcgacgacgggcggccgctcggcggtgaagatgtcgacgggcgtgtgggcgggcagccgcttcggcctgaagggcagcgaggatctcggtggcggctcgaaggcgatcttccagctcgaatcgggcttcagcacggccaacggcacgtcgcagttcgcgggcggcatcttcacgcgccaggcgtgggtcggcctgaccaacccgacgtacggcacgctgacggcgggccgccagtacaccgcgtactacacgctgctgtcgccgtatagcccgacgacctggctcaccggctatttcggcgcgcatccgggtgacatcgattcgctcgataccagctaccgcacgaacaattcgctcgtctacctgtcgccgaagttctacggcttcacgttcggcggctcgtatgcgttcggcggacagccgggcagcgtgaacgccggctccacgtggagcgcgggcatccagtacatgaacggtccgctcggcatcgcggcggcgttccagcgcgtgaacaactcgacgtcgggcggcggcgactggggcgcgaattcgacgacgtcgaacggcggcgcgcagacggccgtgtcggcgatcaacaacggctacaagaccgcgcaggcgcagcagcgcgtcgcggtgacggccggctatcagttctcgtccgcatgggacatctcggtgtcgtactcgaacgtgcagtacatcccgggcgtgaactcgacgttccgcaacacggcgatcttcaacacggcgggcgcggtgctgcacttcaagccgtcggctcagtgggacttcgcgggcggctacgcgtacacgcgcgcgacccagtcgaacggcatcacgagcgccgcgcagtaccatcagttcacgctgtcgcagtactacagcctgtcgaagcgcacgggcctgtacgcggtcgaagcgtatcagcgcgcgaacggcaagacgctcgcgggcggcaagatcatcgacgcgaccgcgtcgatcggcgacggcttcaacacgtcgccgtcgtcgtcgcgcagccaggtgggcgtcggcgtcggcctgatccaccgtttctga

SEQ ID NO: 1096 - DNA, 1140 bp, Burkholderia pseudomallei
atgagacattcggcccgcctgctggcctgcggcgcgctctgcgtcaccgccgcgcatgcgcacgcgcaatcgagcgtcacgctatacggcatcgtcgacaccggcatcgaattcgtttcgcacgcgagcgcgaagggcggttccgcgtggcgcatgccggccgtcacgggcgagctgccgtcgcgctggggcttgcgcggcgtcgaggatctcggcggcggctatcgcgcgctcttcgcgctcgaaagcggcttcaacctgcgcggcggcgagctcggccagggcgggcgactgttcgggcgtcaggcatacgtgggcctgcgcgcgccgttcggcacgctcgcgttcggccggcaatacatgatgacttatgtcgcgctgcagggcgcggacatcatcggccccgacatctacgggctcggctcgctcgacgcttacatcccgaacggccgcgcggacaacgcggtgacctatgtcggcagctatcgcggcgtgacgctcggcgccggctattcgttcggccgcgactcggcaggcaccggcaattcgccggggcagggcacgtgcgtcggctcggtgccggggcgcgcggtcgaatgccggagcgggtcggcgatgctgaagtacgacgccgagcgcttcggcgtggccgcgtcgtacgaagagcagcgcggcggcgcgaacgcggcggcgaacttcttcgacggtgccgcgccgatgccgatcgcaagcagtgcggacaaggacacgcgcgcgcacgtgagcgcgtacgcgaacgcggggccggtcaagctcggcgcgggctggatcggccggcgcgtgtcgaccgacgcgcccgccgcgcccgacgtgcgcaccgatctgttcttcgtcggcgccgcctatcgcgcgacgccgttcgtgacgatcgacggcgaagcctaccggatcgtcgatgcgcggcacgacgcgcgcgcgacgatggcgacgctgcgcgcgagcttctcgctgtcgaagcgcaccgccgtctatgcgcagaccgcgtacctatggaacagcgcgcacgcgcgctattcggtgagcggcggcggaggcggcacgacgcccgcggccggcgtcggccagctcggcgcgatggtcggcgttcggcacatgttctga

SEQ ID NO: 1097 - DNA, 1725 bp, Burkholderia pseudomallei
atgcgattcatgcagatcatgcgccgggcgcgcatgctcgcgccgctcgcgttcgccgcgctgcaagcttgcggcggcgacggcgtcgatcccgcgctgccgcgccttgccgccgcggcgcccgccgcgatgtccggaacctgcggcgcgctcgccgcgaagctgcgctatccgcgtaccgcgttcacctcggtggcgactgcggcggccggcgcgctgagcgtcgcgggcaagccggtgggcgagcattgcgtgatcgcaggcaagatgaacgagcgcgtgagcgcgatcgacggcgagacttacgcgatcggcttcgagatgcggctgccgaaggcatggaacgggcgcttcttctatcaggcgaacggcgggctcgacggcgacgtcgtcgcggcgacgggcgacatcggcggcggcgggccgctcgacaacgcgctcaggatgggcttcgcggtgatcagctcggacgccgggcacagcgcggcgcagaacccgctgttcggcatcgatcccgatgcgcggctcgattatggctaccgcgcggtcgacgcgctgacgccgatggccaagcaggtgatccgcctcgcatacggcaaggcgccggaccgcagctatttcggcgggtgctcgaacggcgggcgtcatgcgatggtcgcggcggtgcgcaacgcgggcgactacgacggcatcgtcgcgggcgatccgggcttgcacctgccgaaggcggcgatcgccgaaatggccggcgcgcaacagttcgcgcgaatcgcgaccgcgaccgccgccgccggccggcccgacatccggagcggcttcaccgatacggagcgacggttcgtcgcgagccgcatactcgcgaagtgcgacgcgctcgacagcgtggcggacggactcgtcgaggacatcgccgcctgtcaggcgcgcttcgatctgaacgccgacgtgccgggctgcacgaatggcgtgcgcacgagccaatgcctgacgggcgcgcagaagacggcgctcgcgaacgtgttcgccggcgcgcgcaacagcgcgggcgaggcgctgtacgcgagctttccgttcgatgcgggcgtgagcggcgacaactgggccgcgtggaagcagggcaatgcgatgacgctcgaccccgcggcggcggcgttcacgttcacgacaccgccgcggcgcccgtcggcgctcgcggatctcggcgcctacgcgctcggcttcgacatggaccgcgacgcgccggcgatcttcgcgacgagcggcgtctatgcggcatccgcgtggtcgttcatgacgccgccggacgaagcggacctgtccgcgctcaagcgccgcggcggcaagctgatcgtctatcacggcacgagcgatccggtgttctcgtcgaccgatacgaccgactggtacgtgcgcgtgatgcaggcgaacggcggcgatgcgagcgacttcgcgcgcttttttcgcgtcgcggggatgaaccattgctcgggcgggcccgccgccgaccagttcgacatgctgacgccgcttgtcgcgtgggtcgaggccggcaaggcaccggacgcgatcgtcgcgaccgcgcgcgacgcgtcgaacgcggcacccaatcccgaggtgccggcgtcatggggcgcggcgcgcacgcggccgctgtgcccgtatccgcgcgtcgcgcgatacgacggcggcgacgtgaacgcggcggcgagcttcagctgccggtag

SEQ ID NO: 1098 - DNA, 4962 bp, Burkholderia pseudomallei
atgattccgcttgcaatagccgtggctctgatgttttcaccctacgcatgggcgggtgtcggcggagccgacaacggcgtgacggggacgagcaacaacggcggggtaggcggctcgtccggcggcggcggtgtccagttcagcgacatgggcgtggcctttgtcggcgatggcgactgctcgatgctcacgtccgggccgggatcgtatgccggcgtatacggttcggggagcaattatctgggcggcctgttcggcttcggcgcacagacgtcggccgtcggctgggggacgcccagcaacgccggcgccaacagcggtatcgtcccataccagggcgctgctcaaaccttcggcaacgtcacctatgccggcaacggcacgcagagcggcaacttcacgcaggcgttcggcctgaattcctttgcggtcggctgcggcgctcacgcgaccggcctgagcgcgacggcgatcggctggggaaccaccgcgagcggcgccggaagcgtcgcgctcgggctgtacagcaccgcgagcggccagggatcgttggcgttcggcaccagcgcgacggcgacggccaccgacaccatcgcgctcggcacgctggccacggccaacgcggtcagcggcgtggcgatcggcgcgaacacgcaggcttcggccgccaatgcaaccgcgatcggcggcaattcatccggcgccaacctcggcgcgcaggcgacggcggccggcgccactgcgatcggcggcaacgcgacggccggggccgccgcgacggcgacgaacgccatcgcgatcggcgggcagtcgtcggcgaaggatgcgaacgatgtggccgtgggcgtgggcgcgagggccggcacgggaagcggcgcgggcaacgatctcgcgatcggcaatggcgcgacggccacgggcggcaattcgatcgcccagggcgcgggcgcgagcgccaatgcggccggcgcggtggccatcggcaaatcggcgtccgccgccggcgggcaagccgtttcgatcggcgtggccaataccgcgtcgggcaacggcgcggtggcgatcggcgatccgaacgtcgcgaccggaaccggcgctgtcgcgctgggcaacaacaatacggccaatggtcaaggcgcggtggcgctgggcaacgtcagcacggcggtcggccaaggcagcgtggcgctcggcaacagcagcaatgcggccgcggcgggcggagtggccttgggcgataccgcgagcgcggtgatggcgggcggcttggcactcggctcgctcgcgacggcgagcaatgcgaacgacgtggcgctcggcgcgggttcgaaaaccgccgcggcagtcgcgacgtccacggtttcggtgaacggcgccaactacgcggtggcgggaagcggcccggccagcacggtcagcgtgggtgcgccgggcagcgagcgcacgatcaccaatgtggccgcgggtcaagtaagcgccggttccaccgatgcggtgaatggttcggaactgtacgcgacgaaccaggcaatcacgaccggattgtcgacagcgaacagcagcatcgcgtcgttgtccacgtcgacgtcgacgggtctttcgagcgccaacagcaacatcggctcgttgtcgacgggtttgtcgaccgccaacagcacggttgcgtcgctgtcgagttccacgtcgacggggctgtcctcggccaatagcgcggtggcgtcgctgtccacgtcgacgtcgacgggtctttcgagcgccaacagcaacatcggctcgttgtcgacgggtttgtcgaccgccaacagcacggttgcgtcgttgtcgacgtccacggttgccagcctgaattcgctgtccaccggattgagcacgaccaatagcaatgtcgcgtcgctgtcgagttccacgtcgacgggattgtcctcggccaatagcgcggtggcgtcactgtccacgtcgacgtcgacgggtctttcgagcgccaacagcaacatcggctcgttgtcgacgggtttgtcgaccacgaacagcacggttgcgtcgttgtcgacgtccacggttgccggcctgaattcgctgtccaccggattgagcacgaccaatagcaatgtcgcgtcgctgtcgagttccacgtcgacgggattgtcctcggccaatagcgcggtggcgtcgctgtccacgtcggcgtcgacgggtctttcgagcgccaacagcaacatcggctcgttgtcgacgggtttgtcgaccacgaacagcacggttgcgtcgttgtcgagctcgacgtcgaccggtatcggttcgttgtcgacgggggtggccaattctgtccagtatgacagtcctgctcatacgtccattaccctgggtggcgccagtgcaacgtcacccgtgaagatcactaatttggcggcgggcgcgaacccgagcgatgccgtcaactatgagcaactgacatcgctgtcgacgtcggcgtcgacgggactgtcgtcggccaacagcgcgatcacgtcgctatccacctcgacgtcgaccggcatcggttcgctgtccaccggactgagcacgaccaacagcaacgtcgcgtcgctgtcgacgtcggcgtcgacgggactgtcgtcggccaacagcgcgatcacgtcgctgtccacctcgacgtcgaccggcatcggctcgctgtccaccggactgagcacgaccaacagtaacgtcgcatcgctgtcgacgtcggcgtcgacgggactgtcgtcggccaacagcgcgatcacgtcgctgtccacctcgacgtcgaccggcatcggttcgctgtccaccgggttgagcacgaccaacagcaacgtcgcgtcgctgtcgacgtcggcgtcgacgggactgtcgtcggccaacagcgcgatcacatcgctatccacctcgacgtcgaccggcatcggttcgctgtccaccggactgagcacgaccaacagcaacgtcgcgtcgctgtcgacgtcggcgtcgacgggactgtcgtcggccatcagcgcgatcacgtcgctgtccacctcgacgtcgaccggtatcggctcgctgtccaccgggttgagcacgaccaacagcaacgtcgcgtcgctgtcgacgtcggcgtcgacgggactgtcgtcggccaacagcgcgatcacgtcgctgtccacctcgacgtcgaccggcatcggttcgctgtccaccgggttgagcacgaccaacagcaatctgagctccctgtccacgtcgagctcgaccggcctgagtacggccaacagcaacatctcgtcgctgtccaccgggctgaattcgttgtcgaccgcggtcaacggcggcgggacgaagtacttccacgccaactcgacgcagccggacagtcaggcgctgggggcggattccgtcgcggtcgggccggcggccatcgcggcgggcgcaagcggcattgcgatcggcaatgcggcgaacgcggccgcaaacggcgccgtcgcgatcggccaggccgccgtcgcgaagggcgggctggctgtctcgatcggggtgtcgaacacggcgagcggagacggcgcggtggcgatcggcgatccgaacgtcgcgaccggcaccggcgcggtcgcgcttggcgcggacaattcggcaaacggccagggcgccgtcgcgctcggcaacgcgaacatcgcaaccggaacgggctcgcttgcgttcggcaacacgtcgacggcggcagcggcgggcgcggtcgcgttgggcgccggcgcaatcgcgaacaatgcgaacgatgtcgcgctgggttccgctagcgtgaccgcggctgcgaatccggtggccagcgcgttgatcgcaggtcaggcttattcgcttgccggcggcgcgccggcgagcgtggtgagcgtcggcgcgcccggcgccgaacggcaaatcaccaacgtcgcggccgggcggatttccgccacgtcgaccgatgcggtgaacggctcgcagatgaatgcgatgactcaggcgctggaatcgctgtcgacttcgacggccagcgcgctgtccacggcgcaaagcggtctgggttcgttgtcgacggggctcagctcgacgcagagcagcgtgagttcgctgtcgacggggctcagcacgacgagcggcaatgtggcgtcgctgtcgagcggtctgggcacgatgcaaagcggtatcgcgtcgctgtccacggggctgagcacgacgaacagcagcctcgcgtcgctgtcgaccgccgtgtccggcggcggtgttcgcaccagcagcttgggcgacacgtcggcgggcaatggcgcgaacgcgtccggcggcaacggcacggcggtcggcggcgccgcgtccgcttcgggaaccgatgcgaccgcgctgggccaggcgtcgaacgcgtcgggcaatcattcgaccgcattggggcaagcatcgagcgcgtccggaagcggctccaccgcggtgggacaaggcgccggcgcgcccggcgacggcgcttcggcattcggccaaggggcacttgcctccggtacggactcgacggcgctcggcgctcattcgacggctgcggcgccgaattcggcggcgatcggcgcgaattcggtggcgtccgcgccgaattcggtgtcgttcggttcgcggggccatgagcgcaggctgacgaatgtcgcgccggggatcgacggcaccgacgcggcgaacatgaaccagctctggggcgtgcaatcgagcgtcgatcaggcggcgcgccgcgcctattccggggtggcggccgcgaccgcgctgacgatgattccggaggtcgaccccggcaagacgatcgcggtcgggatcggcgcgggcagctatcaagggtattcggcgtccgcgatcggcgtgtccgtgcggttctccgacaacctgaaggcgaagctcggcgtggggatcagcgctcagggcagcacatatggcgcaggcgtctcgtaccagtggtag

SEQ ID NO: 1099 - DNA, 840 bp, Burkholderia pseudomallei
atgagctacaagagcatcctggtccacctcgacacgagcgatcgcgcacgcgcgcggctcgagaccgcgctgacgctcgcgcgccagttcggcgcgtacctgagcgccgtcttcgccgtctacacccccgagccgacgtcgttctacgtgatggcgggcaccgccgactacttcgccgatcagcaaaggcggcgcgacgagaagcgcgcggcgctcgagcgcctgttccacgccgaactcaagcgcgcggacgtcgagggccagtggatcgtcgccgacgcgcgcgcgaacgaagcggtgccgcattacgcgcgctacgcggatctcgtgatcgccggccagaccgatccggacgatccggaaacctatgtcgacgacagcttccccgacacgctcgtgctgtcggccggccgcccggtgctgctgctgccgtacgcgggcatgccgtcggcgattggcacgcgcgtgctcgtcgcgtgggacggcagccgcgaggcgacgcgcgccgttcacgacgcggcgccgttcctcgcgctcgcgacgaagacgacgatcgtcaccgtgaacggcgccgcgcacgagccgcccggcgcgcgaattccgggcgccgacatcgcgctcacgctcgcgcggcatcacgcgaacatcgacgtgcgcgacctcgaacgcgcgcgcgacgcgtcgatcggcgacgtactgctgtcgcacgcgtacgaatcgggcaccgatctgctcgtgatgggcgcatacggccacgcgcgctggaaggagctgattctcggcggcgtgacgcgcacgatctttgcgtcgatgacggtgccggtgctgatgtcgcactga

SEQ ID NO: 1100 - DNA, 1125 bp, Burkholderia pseudomallei
atgaacaagactctgattgttgcagcagttgctgcatcgttcgcaaccgtcgctcacgcgcaaagcagcgtcacgctgtacggtgtgctcgacgcgggcatcacgtaccaaagcaacgtcgcgacgccgtcgggctcgggcaagtcgctgtggtcggtcggcgccggcgtcgaccaaagccgtttcggtctgcgcggctcggaagacctgggtggcggcctgaaggcgatcttcacgttggaaagcggcttcaacatcggtaacggccgcttcaacaacggtggcggcatgttcaaccgtcaagcgttcgtcggtctgtcgagcaactacggcaccgtcacgctgggccgtcagtacgacgcaacccaagactacctgtcgccgctgtcggcaacgggcacctggggcggcacgtacttcgcgcaccggctcaacaacgaccgcctgaacacgaacggcgacgtcgcggtgaacaacacggtcaagttcacgagcgcgaactacgccggcctgcaattcggcggcacgtactcgttctcgaacaactcgcaattcgcgaacaaccgtgcatacagcgcgggcgcttcgtaccagttccaaggcctgaaggtcggtgcggcgtactcgcaagctaacaacgctggcgcgaacaccacgggcgcaacggatccgctgaccggcttcaacatcggcggcacgaacgcagcaagcatccaaggccgttcgcgcgtgtacggcgccggcgcaagctacgcttacggcccgctgcaaggcggcctgctctggacgcaatcgcgtctcgacaacctggcaaacggcgcgccgaccacccgtgccgacaactacgaagcaaacgtgaagtacaacctgacgccggctctgggtctgggtgttgcttacacgtacacgaacgcgaaggcgaacggcgaaagcactcactggaaccaagttggcgtccaggccgactacgcgctgtcgaagcgcaccgacgtgtacgcacaagccgtgtaccagcgttcgtcgaagaacgcgaatgcgtcgatctacaacggcgacctcagcacgccgttcagcacgtcgatcaaccaaaccgcagcgacggttggtctgcgtcaccgcttctaa

SEQ ID NO: 1101 - DNA, 1089 bp, Burkholderia pseudomallei
atggtcaagcatgcggcagcaacattactcggcgcgctcgccgtcgccggcgcgtgggcgcagagcagcgtcacgctgtacggcagcctcgatgccggcgtcgcgtacgtgaacaacgtcggcggcggcgcgaagtggtcgatgattcagggcaacacgcagcccgatcgatgggggctgaagggcgtcgaggatctgggcggcggtctgaaggcgatcttccagctcgaaaacggcttctatacgaacaacggccagatggcggcggcgggcacgatgtggaaccgtcaggcgttcgtcggcctgaattccgaccggctcggcgcgctgacgctcggccaccagacgccgttcaacttcgactggctcgacccgctgtcgagcgcattcctcgcgcagagctggtatgcgttccatcccggcaacctcgaccagctcgcggacaccagcaccgtgccgttcaacaactcggtcaagtaccgctcgcccgcctttgcgggcttcacggtgggcgcgatgctcggcttcggcaacacgacgaacttctcgaccggccgcacgatgagcttcggcgtgaactacgcgaacggcccgttcaaggcggccgccgtctattcgaacgagcacgaccaggcgttcccgatggcgaccgtcggcggcatcgccgggccgggcggcacgttccagggcatgcccgtcgcgagctatgtcgcgaagaaggcgcagaacatgggcgcgggcctgtcgtaccgcttcggcccgctgctcgtgcacggcctttacacgcgcgtgaaactgcaggcgaacggccactcggatacgttccagagctacgacgccggcgcgaactaccagagctcgccgttcaacgtgatcgcgggcggcgcggcgacttcgacgctcgccggccgccgctggagccagttcgagctcggcgacacgtattcgctgtccaagcgcacgcagctctacgtgaacgtgctgtacgagcacgcgagcggcaacgcgaaggccgcgttcttcacggcgggcgcgtcgagcacggcgaatcaggtgattgtcctgacggggattcaccactcgttctga

SEQ ID NO: 1102 - DNA, 2316 bp, Burkholderia pseudomallei
atgtcgctggcggtgagcgcggcgatgggctgcatggcgaccgacgccgcggcgcaggtcagctatgcggcgggcgagaacgcctatgccggccccggcggcaataccggcccgtgggcgttctacaacccggccttcagcgcgggcacgctgctgtacggcaccgcggtcggcaactacgcctatgcgaacggcgagggcagctcggcctacggcgatcacgcgacggtgaaggggcgcatcggctccgcgttcggcgcgtattcggaagcggcgggcgacggcagcactgcaatcggcgccagcgcgcgggcgctgccggacttcagcatcgcgatcggcacgaacgcgcaggcgctgaaggacacgggccaatcgattcccggccgcgaagacatcggcacgatcgcgatcggcgcgggcgcgctcgcgcagggcgacaacagcgatccgctgcacgtgtccgcgccgaacgcgttcggcggctattcgagcgcgacggcaagcggcgcggtggcgctgggcgaaggcgccgcatcgtccggctattacgcgaacgcgctcggctcgtattcgaaggcgtcgggtgcgggtgcggtcgcggtgggcggcggcgcgcaagcgagcgcgcaaggcgcggtggcgatcggcggcgcgacgagcgtcgacaacgcaactgcgctgtccggctacgcgagcgcaagcggcgtcaacgcgatcgcgatcggttccggcgcgcaggcgacgggcgcccggtcgatcagcatcggcacgggcaacgtcgtgtcgggggcgagctcgggcgccttcggcgatccgtcgacggtcacgggcacgggctcgtattcgttcggcaacaacaacacgatcaattcgaacaacgcgttcgtgctcggcaacaacgtgacgatcggcccagggttcgacggctcggtcgcgctcggtagcggcacgacgctcgccgcggcgaaccccaccggcagcgcgacgatcacgacgagctcgggcggccagttgacgctgtccggcttcgccggcgcgaatccgacgagcgtcgtcagcgtcggcgcgcccggcgccgagcgccagatcacgaacgtcgcggcggggcgcatcacgccgacgtcgacggatgccgtcaacggcagccagctgtatgcggtcgcgagcacgatcgacaatgcggtgaacggcggcgggatcaagtacttccacgcgaattcgaccctggccgattcgacggcggcgggcacggacagcgtcgcggtcgggccggccgcgctcgcctacggcaacgattcgatcgccgaaggcacgaacgcgacggcgggcgtgagcggcaatccggcggtggcgggcgatgtcgcgctcggcagcggcgcgcaggcgacgggaggccgctcgctcgcgctcggcgcgaacgcgtcggtcaacacggcgggcggcgtggcgctcggcgccggctcggtcgcgaaccgcgcggccggcacgtacaccgatccgatcacgggcagcagcttcacgaccgcattcggcgcggtgtcggtcggcctcgagggttcgctgcgccagatcaccaacgtcgcggcgggcacgcaggcaacggatgcggtaaacgtcggtcagttgcaaggcgcgattgcgcagttgaatcagacgatccagaacatcacgaacggctccaactcgggcaacaccggcaataacggcaacaacaccgggcagaccgtgtcgggccagtggatcacgggcaacccgtcgacctatacgccgcccgtggcgagcggcatcggctcgaccgccgcgggcagcggcagcgtggcgtccggcgcgaacagcgtcgcgatcggcgacggcgcgtcggcctccggcaacaactcggtggcgctcggcgcccattcggtcgcgagcgcgccgaacacggtgtcggtcggctcggtcggcaacgagcggacgatctcgaacgtcgcgccgggcgtgaacggcaccgatgcggtgaacgtgaaccagttgaacagcggtatcggcaatgcggtcggccaggcgaatcagtacacggatcagaaggtcgaccatctgcggcgcgagatgaacggcggcgtggctgcggcgatggccgtggcgggcttgccgcagccgaccgcgcccggcaagagcatggtcgcgatcgccggctcgacgtggcaggggcagcagggcttcgcgcttggcgtatcgacgatttccgagaacggcaagtggctgtacaagggctcgctcacgaccagcacgcgcggcggcacgggcgcggtgctcggggccggttatcagtggtga

SEQ ID NO: 1103 - DNA, 954 bp, Burkholderia pseudomallei
atgacgacaccggttttcgacgcggctcagacggcgcgcgtcacgcctttcgccgaactcgtcgacgcgctgcgcacggcggcgctcgatgccgacgcgggctgtatcgagagcccggcgcggctcgtcgtgccgctcaacgaaggcggggtcatgctgtcgatgcccgcgtcggcggccgatctggcgatccacaagctcgtgaccgtatgcccgcgcaaccgcggcggcgatttgccgacgatccaggggcaggtgagcgtcgtcgatccggccacgggcgcgccgctcttcgcgctcgacgggccgaccgtcaccggccgccggacggccgccgtcacgctgctcgcgctgcgcacgtttgtcgccgccgcgccgcgcgacgtgttgctgatcggcaccggcacgcaggcggcgcatcacgtcgaggcgctcgccgcgctgtttcccggcgtgcgcgtgcgcgtgaaggcgcgtgcgcccgcgcaggcggcggcgttttgcgcgcgtctgcgggcggtgctgccgacgctcgagccgctcggcggcgacacgctgcccgagacgctcgacgcggtcatcacggcgacgacgagcgcgacgcccgtctacgacgacgcggcgcgagccgggcggctcgtcgtcggtgtcggcgcgtttacgcccggcgcggccgaagtcggcgcgcggacgatcgcgggcagcgcgctctacgtcgacgatccggcgggcgcgcgccacgaggcgggcgacctgatcgtcgcgggcgtcgactgggcgcgcgtgcgctcgcttgccgacgcgctgcgcgccaccgtgtcgacacccgcctccaacgcgtcgcccgcaccgggcgcgcccgtgttcttcaagagcgtcggctgcgcggcatgggatctcgccgcgtgccgcgtcgcacgcgcagtcacttcacgcactcgagcgtgtacttga

SEQ ID NO: 1104 - DNA, 1155 bp, Burkholderia pseudomallei
atgaaaaagcacgtcatttccgcagccgcattgctggccttcgccgcgccggttttcgcccaaagcagcgtcacgctgtacggcgtgatcgacgaaggcttcaactacacgagcaacgtgaacgtcaacggcgtcggcaagagcaactaccagctcgcgagcggtttcgtgcagggcagccgctggggcctgcgcggctcggaagacctgggcggcggcctgaaagccatcttcacgctcgaaaacggtttcgacgtgaacaacggccggctcggccagggcggccggatgttcggccgccaggcgttcgtcggcctgtcgcacgcgcaatacggctcgctcacgctcggccgccagtacgattcgctcgtcgactacctcgcgccgttgaccgcgaacggcaactggggcggcacgctgttctcgcatccgttcgacaacgacaacacggacaactcgttccgcgtgaacaacacggtcaagtacgcgagcccggactggaacggtctgcaagtcggcggcacgtacagcttcagcaacgcgacgggcttctcgaacaaccgccagtacagcatcggcgccgcgtacacgctgggcggcctgcaacttgcggccgcgtacctgcaggcgaacaacccgggcaagacggcgggcggcgcgatcgccgacaacgacgcgaacttcacggcggaccgcctgcgcatcttcggcggcggcgtcaactacacgttcggcccggcgacggtcggtttcgtctacacgaagaccgacgtgaagaacccggtctcgacggtctatctgccgacggcgacgttcgcgggcctcggcctgagcgcgacgaagttccagaacttcgaaatcaacggcaaataccagctgacgccggcgctcttcatcggcgcgcagtacgtgtacacggacggcaagttcgatgcggccgcgggcagcgtcaagccgaagtaccacacggtcggcctgatggcggactacaacctgtcgaagcgcaccgacgtctatctgcagggcgcgtaccagaaggtcgcgggcgacaagacgggcacgatcgcggatggcggctacgtcgtcgggacggacggcccctcggcgtcggcgaaccagttcgcggttcgcgcggcgatccgtcacaagttctga

SEQ ID NO: 1105 - DNA, 3396 bp, Burkholderia pseudomallei
atgctgatgacccgccacaaaaaacggaaaacgatgaagcgcagcggagcgaagctgcttgcgcccgtggtcgtcgcggccgccgccgcggtcgcggcccgccccggctgggcgcaggccgcgccgtacccggatccgggccggcgcggcgatccggcgagttggcgcacgccggaattcacgaacgcgtgggggctcggcgcgatgcacgccgagtatgcatacgcggccggctataccggcgcgaacgtcgcgatcggcgtgctggactccggctactacgcgcagcatccggaactacccgacagccgcttcgttccggtgacggccgcgggcgtgtccggcgtgctgaatccgaacaacaacaatcacggcacgctggtgagcggcgtcgtcggcggcgcgcgcgacggtgtcggcatgcacggcgtcgcacccgacgcgacggtgtacgaaggcaacacgaacgcgaccgacggcttccggttcggcgtatcggatccgaagtttcccgcgtcggatgcgaagtatttcgccgaggcctacgatgcgctcgccgcaaagggcgtgcggatcatcagcaacagctggggctcgcagccggccaacgagaactacagcaccctgaacaaactcaccgatgcctacaagctgcacgaggcggtgcgcacggcgaccggccggggcacgtggctcgacgcggcggcgaaggtgtcgcgtgacggcgtgatcaacaacttcagctcgggcaacaccggctacgacaacgcgagcctgcgcggcgcgtatgcgtacttccaccccgaactcgaagggcactggatgacgacgacgggctacgaccagttgagcggccaggtctacaaccaatgcgggatcgcgaagtggtggtgcgtgatggcgcccacgggcgtgccgtcgacgtcatattcgggcggcgcggcggcgccgaccggggcgacctacgcgaacttcaacggcacgtcggccgccgcgccgcacgcgtcggcggcgctcgcgctgatcatggagcgctttccgtacatgacgagcgagcaggcgctgtcggtgctgttcacgaccgcgcagaacatggagccggacccgagccggccggactacacgaacaacgggctgttctcgaccgtgcatccggcgaagcccggcgcgtcgggcgtgccgaacgcgttcggcggctgggggctcgtcgacctgcgccgggcgatgaacggcccgggccaactgctcggcacgttcgacgcggcgctgcctgcgggcaccgccgacgtgtggtcgaacgacatctccgacgtcgcgctcgccgcgcgcaagcgcgaggacgacgccgagcaccgcgcgtggctcgacacgctgaggacgaagggatgggagcacgggctgcccgccggcgcgagcgatggcgaccggatcgactatgcgctcggcgtcgcgcgcgaaaccgcgtatcaggcgcgcgagtatcagggcagtctcgtgaaatcgggcggcggcacgctgacgctcgccggcgcgaacacctatcgcgggcccacgacggtcgacggcggcgaattgaggatcgacggctcgatcgccgcgcgcgccgtcgtcaatccggcgggctggctcacggtgaacggccgcgcggccgacatcgcggtcaacggcggcgtggcgacgatcgccgggacgagcgcgaacctgtcgatcgacaggcagggccgggccgccgtgacagggacgacggcggacgtgcgcgtcgcgagcggctttgcatcgctcggcggcacgagcggcagcgtcgcggtgggggcgctcggcgtcgccgcgatcacgggccgcacggccgacgtggcggtcgacggcggccgcgcgtcgctcgacggcgcgagcggcaacgtcgcggtcggcaacggcggcgtcgtgagcggcagcggcacggtgcgcacgctcacggccgccgcgaacggcacggtcgcgcccggccattcggtcggtacgctgacggtgtcgggcgacgtgcgcttcgcgccgggttcgatctacgcggtcgaggtgtcgccgggcggcgcgggcgaccggatcgtcgcgggcggccgcgcgcaaatcgacggcggcgcgttggcgctcgcgctcgagaacacgccgccgccgctcacgcccgagcagtcgcgctcggtgctcggccgtcgcttcgagatcctgaatgcggcgggcggcgtggccggccgtttcgatgcgccgagcggctatctgttcgtcaatccggtgctcgcctatggcccgacgaccgtgagcctcacgatcgatcgtaacgcgacgccgttcgcaagcgtcgcgcggaccgcgaacgagcgcggcgtcgccgatgcgctcgaaacggcggacccgggcagcgcggtttacaacagcgtgctgttcgcggcgtccgcgcaggcgccgcaggcgacgctcgcgcaactgacgggcgagatctatccggccgcctacgcggcgctcgtcaacgaaagccggcaagtgcgcgaagcggcgctcgagcgcctgtggacggcgcgcggcgcgccgggccgcgccggcgcctgggcgcggctgctcggcgcgtggggcagcgcgcgcggcggcgacgtgaacggctacacgagctcgacgggcggcttcctcgcgggcgcggacgcggcgttgctcgacggcgtgcgggcgggcggcttcgccggctacagccacaccggcgtgaacctgaggaatcagccgtcgtccgcgtcgttcgacagcttccatctcggcgcatacgcggggtggcagcccggcgcactcggcgtgcgaatcggcgcggcgcatgcgtggcatcgcggcggcgtcgatcgcgcggtgcaatatggcgcggttgccgagaacgaaacgacggcgctgcacgcggaaacgacgcaggtgttcggcgaggccggctatcggttcgcgctcgatggcgccgcgacgctcgagccgttcttcggcgtcgcgtatgtgcatctgaagaaccaggggacgacggaaaccggcggcgcggcggcgttgcgcgtgcggcaaggcaatcacgacgtgacgttctcgacgctcggcgtgcgcggcgaaacgcggcttggcctgacgtcgcgactgcagttgacgctgcagggcagcgcgggctggcagcatgcgctgacggacgggcagccgagcggcacgctcgcgttcgcgacggggagcgacacgttcatcgtgtcgagcgtgccggttgcgaaggatgcggcggtgctgaacgtgggcgccgggctcgagctcggcaagaacggatggctgcgcgtcggctattccggctcgctcgcgagccgtcagtccgagcacgcggtgcaaggcagcctgcactggaagttctga

SEQ ID NO: 1106 - DNA, 252 bp, Burkholderia pseudomallei
atggcccgccccctgtaccgcattcgtcagttcgcgcagtcccgcgtgcgcggcgggaagctgttctgcgtcggcgcgtgccaggtgcagcagcgcgtcgctggcctgttctggcttgagattgcctattgctcggatcgcaccggcgcggaggcggccatacgagccgccgtgatcgcgcgccggcgagcccggctcaagccgcgcgtgctcggcctgttcgatcgcgacgggcaggcgctcgggcaatga

SEQ ID NO: 1107 - DNA, 264 bp, Burkholderia pseudomallei
atggtctcttcccattcacactgtgaggtgattgacatgctttacgacgacatcgtttccgcattaggcaaagcagttaaagatcccggctatcgcgacaaactcctgaaggatccgaacggcacgctgaaggccgagggcgccgatctcggaaattcggtcaccaccctcgaatgggtcgaatcgaccaactgcctgaatgttcacgtcgcgaacggcggcgcgaactggagcggcgcggtgctgctcaagatcgagaagtaa

SEQ ID NO: 1108 - DNA, 423 bp, Burkholderia pseudomallei
atgagcttattgttcgccttcttgtcgggcttgctgttcggcgccgggttgctgctgtccgggatggcgaatcccgcgaaagtgcagggctttctcgatctcgccggcaattgggatccgtcgctcgcgttcgtgatggcgggggcgatcgcggtcggctcgatcgcgttcgcgttcgccaagcggcgcgagcgctcgttgctcgggctgccgatgcagattccgccgcgcggagccgtcacgccgcgactcgtcgccggcagcgcggcattcggcgtcggctgggggctcgtcggcttttgtccggggccggccgtcgtgtcgcttggcctcggcggcgcgaaggcgttcggcttcgtcgcggcgatgctgatcgggatggcggcgttcgaatgcggcgagcgtttcagggcgaaacgttga

SEQ ID NO: 1109 - DNA, 1017 bp, Burkholderia pseudomallei
gtgacgccgacgatgatgccgcccgacacgcccacgcccgccggcgcgccgccgaacgcgaccactgccgacgatgcgttgcgcgacgtcgcgccgcaaacgggcgcgcgcgcgctcggcgcggcggccgcgcgcgcgcagccgcgcacgcgcgagctgcggatcgccacctacaacattcacggcggcctgggcgcgtggacggcgagcgccgccgagcggatcgcggtggtgctcgacgaactgcgcgccgacgtgatcgcgctgcaggaagtgccgctcggcggcgcgcgcggagccgacgtgctcgcgcacttgcgcgcgtgcaccggcatgcatgcggcagaagggccgacgatcgatacccccgcgcgccgctacggcaacgcggtgctgtcgcgctttccgatccgcgcggcgcgcatgctcgatctgtcgttcggcaaccgcgagccgcgcggcgcgctcgacgcggacatcgaatgcgggttcggcgtgctgcgcgtcgtcgcgacgcatctcgggctgtcggcgaccgagcgcagcgcgcaggtcgcgcggctgctcgccgcgttcgacacgcgcgcgctgcccgtgatcctgctcggcgacatcaacgaatggttcgtccgcggccgcgcgctgcgcgcgctcgtcacgcatttccggcgcgcgcccgcgccgcgtacgttcccgacgctgtgcccgctgttctcgctcgaccggatctgggtgcacccgggcgaatggctcgtcgacgtggcgccccatcgcagcgcccgcgcgcgccgcgcgtccgatcactacccgctcgtcgcgcgcattcgcgcagccccagaaacagacgcggacatcgcgcaagcgccggcgtccgcttcgcgcacgccaccggagcgaccatgcgaaccgaccgactcgacggaacccgcctcgactactggtgcgcccgcgcgctcgccggcgacgacgccacgctgcgcttcgtcgccgtcgcgccgagcgtcgtcgtcaccgtga

SEQ ID NO: 1110 - DNA, 1350 bp, Burkholderia pseudomallei
atgagcgcggacgagcccttgcgcacggccgaattcagccacctggcggatgcgatcgagcgggaaattctcgcggtgtcgggtgtcgtgcgcacgggccgggtcctcgaagtgatcggcacgctgatcaaggtgtccgggctcgacgtcgcgctgggggaattgtgcgagcttcgaacgcgcgaaggcaggctgttgcaacgggcggaagtcgtcggtttcacgcgtgatgtggcgctgctgtcgccgttctcgcaactcgagcagatctcgcggaccacccaggtgatcgggctcggccgtccgttgtcgatcccggtcggcgacgcactgctcggccgcgtgatcgacggcctcggagagccgctcgacggcggtccgccgcttgcgtcggaaacgctgcagccgctgatcgcggcgcctcccgagccgatgagccgtcggatgatcgatgcggcgatgccgacgggcgtgcgagtcgtcgacgcgatgatggcgctcggggagggccagcgcatgggtatcttcgcgccggcgggggtcggcaagagcacgctgctgggcatgttcgcgcgcggcgccgcgtgcgatgtcaacgttatcgcgctgatcggcgagcgggggcgcgaggtgcgggaattcatcgaactgattctcgggcaggcgggcatggcgcgttccgtcgtcgtctgcgcgacgtcggatcgttcgtcaatggagcgggcgaaggcggcctatgcggcgacggcgatcgccgaatactttcgggaccgcggccgacgcgtgctgttgatgatggactcgttgacgcgcttcgcgcgagccgggcgcgaaatcggcctcgcggccggcgagccgcctgccaggcgaggctttcctccgtcggtcttcgccgaattgccgcgcttgctcgaacgcgccggaatggggaggaccggatcgatcaccgcgctctataccgtactcgcggaagacgagagcggcagtgatcctgttgcggaagaagtacgcggcattcttgacgggcacatgatcctgtcgcgggaagtggcggcgaaaaatcagtatccggcgatcgacgtattggggagcctgtcccgcgtgatgccgctcgttgtcgacgatgggcatatgcgagcggcggcgcgggttcgggaattgttggccaaacatcgggaggtggaggtcttgctgcagatcggggagtacaaggcgggggcgaatccgcttgcggacgaggcgatcgcgaaggccgacgcgattcgatcttttttttcgcaacgaacggacgattacgcggccgccgaggacaccgtcgccaggctgtatgcgttgagcggggcgaactga

SEQ ID NO: 1111 - DNA, 2118 bp, Burkholderia pseudomallei
atgttcaaatcgctgaaactgcccgcgggcggtgaaatcggaatcgtcgccctggtcatcgcgatcatctcgctgatgatactgccgctgccgccagtcgcgatcgacctgctgctgggcatcaacatcaccatcagcgtgacgctgctgatggtgacgatgtacgttccggatatcgccgcgctatccgcgtttccgtcgctcctgctgttcacgacgctgttccggctgtcgctcaacatcgcgtccaccaagtcgatcctgctgcatgcggaagcgggcaacattatcgagagctttggccagctggtggtgggcggcaacctcgtcgtgggcctggtcgtattcgccatcatcacgaccgtgcaattcatcgtgatcgcgaaaggctccgagcgtgttgcggaagtcggcgcccgcttcacgctggatgcgcttccgggcaagcagatgagcatcgacgccgatttgcgctccggcctgctgagcaccgaggaggcacggaagaagcgcgcgacgctggcggtcgaaagccagttgcacggcgggatggatggcgcgatgaaattcgtcaagggcgacgcgatcgccggtctcatcatcacgatgatcaacatcgtcgcgggcattgcggtcggcgttgcatatcacggaatgtcggcgggcgacgcggcaaaccgcttctccgtattgtccgtcggcgacgcgatggtgtcgcagattccgtccctgttgctctccgtcgcggcaggcgtgatgatcacgcgcgtcaccgacgagcgcgcgccgaagcggcgctcgctcggcgatgaaatcagccaccagctcggctcgagcgcgcgtgcattgtatttcgcagcgtttcttctgctcggcttcgccgccgtgccgggcttccccgcggcgctgttcgtgctgcttgccgccgcgctcgcgttcgccggctatcgactgtcacgaaagggttcgccatcgtccggcgccgctcgcggacaagagcaggaggcgctgcgtgcgatgcagcgttcgggcgccaaggcggacgtccctccgatcctgccgcgcgcgcctcagttcgcttgcgccgtcggcgttcggatcgcgccggatctcgcgtccggtcttgcgttgccgaggctcgacgaagcgctcgacctcgagcgtgcacgcctgcaggacgaactcgggcttccttttcccggcgtgacgatgtggattcatccgacgctctcggcagcaaccttcgaagtgctgatccacgacgtgccgcatctttccgtcacgcttccggctcgcaaggcgatgctgccgcagcaaaggcatctgtcgcccgctcacgccgcgctgacggacgagcaaaaggcgcggcaccgggatttgatcgaacggagcgaagccggcccgccgatcgacgcaagcggccaagcgacccactggatcgacgagccggcggtcaccgcgaaggacagcgtatggcgcgcagaacagatcatcgcgtacgcatccgtggcggcgatccgcactcacgcaccgctttttgtcggcatccaggaagtgcagtggatactcgatcagttgggcgccgactccccgggcctcgtcgccgaagtgctgaagatcttgccgtcgacgcgcattgccgatgtgctacgccgcctgcttgaagagcagatatcgatccgcaacgtgcgaacgatcatggaaagtctggtcgcatggggcgcgaaggagaaagacatgctgatgttgaccgaatacgtgcgcggcgacctgtcgcgctttctcgcccatcgagccgcgcaaggcgaacgcgtgttgtccgcggtcctgttcgacctgcaggcggaacagcacatccgccaggcgatcaagcaaacgccgacaggcaatttcctcgcactgcccccggacgacgcatcgcggcttgtcgatcgcattcagtcgctcgtcggcgcgaacgcccgcacggacatcgcgctcgtcacctcgatggacattcgccgctatgtacgacgaatgatcgagcgacgcatcgactggctagccgtgtactcgtatcaagagctcggcgaacacgtcgagctgcgtccggtcggccgcgtgtcgctccagggttga

SEQ ID NO: 1112 - DNA, 960 bp, Burkholderia pseudomallei
atgcctgcacgaaaatcctccgaggaggcttgcgtgaatcgctcatttcgttcttccaatcatttgtcctcgccggcccagctgcaacagtccgcagatgcgcagcagcgcaccgccgaccgtcaggcggcgcgcaacagcgcgctgaccgcggcgctgtatcgcggcacgacgaatttcacctacagcaaagatcctgcgccacgcggcaggctgccgagcgtctccaagacgaatgcccttgcgcgaaagcgcaagatcacgagccggctgcgtcgaaacgccgccggcaacggcgatggcgatggcgacgacgttgacggcgcgctcgtgcctcacttcgaagccgaaccgggcggggaccgcgatcgcgatgggcgtgggggacgggagcagccgcgcgacgatcctatggatatcgaaacttgcaggcggcttcctcgcatgcaggcggccgaatcgcgcgccgcggctgccccacgcggccgcttcgatgcggtcgccgatctgcatgcggcccccggtcaggaaggcgagcgcgccgacgcgattgcccgggcctgggagagcgagatgttcggactccaagtatttccccccaatgcgccacgcacggcggagattctcgaattgtcgttggactttcttctcatccagcgacgcatcgggccgattcccgttagtacgctcgccaggctgcgcgagtctcctgctcccacgccggttgcttgcggccgagatcgcctgcctggcgagacggcgccggacgacagacggcgcttcaatctgctctttccgttgctgtggttgcaggcgggcatgccgagaacggccgtccgcctcgattgcgcgatcgccaagctgctcgcgatccgcaacgcgctgcctgacaatccgctagcaacagatgacgcgcaagcggaaccgacaccggcacctcacgcctcatcgagcgaatga

SEQ ID NO: 1113 - DNA, 7905 bp, Burkholderia pseudomallei
atgaatcgctcgtaccgctctatctggaatgaagcacttggcgcgtgggtcgccgcttcggaaatctcgtccgcccgcggcaagccgaacaagtcggccgtcgcgaaggtcgtgaccgccgccgtgctggccgtggtcgtgcaggcagcgcatgcaagcacgatcggcgtcggaactggctcgcttccgggggggtccgcgtgcggcggcattggcggaacaggaataggtcctgacggtacgacgaactatacgaaccgggcgatcaccgacggcagcggattctactcaaccgttgccgggtgctcggccaacggcagtaatgccctgggcgtgacgctctatggcgcattcacgaccgtcaccggagacggtggcacggccatgggcttcgccgcttacgccgcaaagtgggcgtcggccgttggccttcaggcgtccgcgactggccagtccagctcggcattcggattcaatgcgctggcgagcggcgccaactcgcttgcactcggctcgtcgagcaccgcggcgtacgcgaacagcgtcgcgatcggccaaggcagcgtcacgggagcggcggccccgacggggaccggctatttgacgggcagcgccgccccgtcttcggaggtgtccgtcggttcctcgaccaatttgcgccgcatcaccaacgttgcggacggctccgcagcgaatgacgccgtcacggttgcccaactgagtacgggcatgagcacgaccactagcgcaatcgccagtttgtcgacctccacatcgaccgggctttcgtcagccagaagctcgatcgcgtcgctgtccacgtcgacttcgaccggcctgagctcggccaccagctcgatcgcttcactgtcgacttccacgtcgaccggcatcggttcgctttccaccgggctgtcgaccaccaacagcaacgtcgcctcgctgtccagcggcctgagcagcacgaacagctcgctgacctcgctgtcgacttccgcctcgtcgggcatcagcaccgcgcagagcggtgtcaattcgttgtccaccgggctgtcgaccaccaatagcaacgtcgcttcgctgtccacgtcgacttcgaccggcttgagctcggcgaatagctcgatcgcctcgctttcgacttccgcttcgtcgggcatcagcaccgcgcagagcggcgtcaattcgttgtccaccgggctgtcgaccaccaatagcaacgtcgcttcgctgtccacctcgacctcgaccggcctgagctcggccaccagctcgatcgcttcgctgtcgacttccacgtcaaccggtatcggctcgctttccaccggcctgtcgaccaccaacagcaacgtcgcctcgctgtccagcggcctgagcagcacgaacagctcgctgacctcgctgtcgacgtccgcttcgtcgggcatcagcaccgcgcagagcggtgtcaactcgttgtccaccgggctgtcgaccgcgaatagcaccgtcgcttcgctgtccacctcgacttcgaccggcctgagctcggccaccagctcgatcgcttcgctgtcgacttccacgtcgaccggtatcggctcgctttccaccggcctgtcgaccaccaacagcaacgtcgcctcgctgtccagcggcctgagcagcacgaatagctcgctgacctcgctgtcgacttccgcctcgtcgggcatcagcaccgcgcagagcggcgtcaattcgttgtccaccgggctgtcgaccgcgaatagcaccgtcgcttcgctgtccacctcgacgtcgaccggcctgagctcggccaccagctcgatcgcttcgctgtcgacttccacgtcgaccggtattggctcgctctccaccggcctgtccacgaccaacagcaacgtcgcctcgctgtccagcggcctgagcagcacgaatagctcgctgacctcgctgtcgacttccgcctcgtctggcatcagcaccgcgcagagcggcgtcaattcgttgtccaccgggctgtcgaccaccaatagcaccgtcgcttcgctgtccacgtcgacttcgaccggcctgagctcggccaccagctcgatcgcttcgctgtcgacttccacgtcgaccggcatcggctcgctctccaccggtctgtccacgaccgatagcaccgtcgcttcgctgtccacgtcgacctcgaccggcctgagttcggccaccagctcgatcgcttcgctgtcgacttccacgtcgaccggtatcggctcgctttccaccggcctgtcgaccaccaacagcaacgtcgcgtcgctgtccagcggcctgagcagcacgaatagctcgctgacctcgctgtcgacgtccgcttcgtcgggcatcagcaccgcgcagagcggcgtcaattcgttgtccaccgggctgtcgaccaccaatagcaccgtcgcttcgctgtccacgtcgacttcgaccggcctgagctcggccaccagctcgatcgcttcgctgtcgacttccacgtcaaccggtattggctcgctctccaccggcctgtccacgaccaacagcaacgtcgcctcgctgtccagcggcctgtcgacgaccaatagcaacgtcgcgtcgctgtccagcggcctgagcagcacgaatagctcgctgacctcgctgtcgacgtccgcttcgtcgggcatcagcaccgcgcagagcggcgtcaattcgttgtccaccgggctgtcgaccaccaatagcaccgtcgcttcgctgtccacgtcgacttcgaccggcctgagctcggccaccagctcgatcgcttcgctgtcgacttccacgtcaaccggtattggctcgctctccaccggcctgtccacgaccaacagcaacgtcgcctcgctgtccagcggcctgtcgacgaccaatagcaacgtcgcgtcgctgtccagcggactgagcagcacgaatagctcgctgacctcgctgtcgacgtccgcttcgtcgggcatcagcaccgcgcagagcggtgtcaactcgttgtccaccgggctgtcgaccgcgaatagcaccgtcgcttcgctgtccacctcgacctcgaccggcctgagctcggccaccagctcgatcgcttcgctgtcgacttccacgtcgaccggtatcggctcgctttccaccggcctgtcgaccgtcgcgacgacgaccaacaatctcggcagcagcaccgccgcggcgctcggcggcggcgcgacgtacaatccggccaccggcacgatttccgcgccgtcgtacacgacgtacaacgcgaacggcacgaccacggccaacaccagtgtcggctctgcgatcgacagcatcaacgcgaacggcatcaagtacttccatgcgaactcggcggggccggacagcgtcgcgaccggcgcggacgccgtcgcgatcggcacgggcgcgacggccgccacggcgaactcggtcgcgctcggcgcgaactcggtgacggccgcggccgtcccgaccagcagcgcgaccgtcggctcgaccacgctcggtacgttcgcgggcagcgcgcccgtgggcgtcgtgagcgtcggggcgccgggcgcggaacgccagatcacgaacgtcgccgccggccaggtcaccgccagcagcaccgatgcgatcaacggcagccagctctatgcggttgcgtcgaagctcgactcggcctcgagttcgatttcgtcgctgtcgacgggactgtcgtcggccaccagttcgattacttcgctctccacttccacctcgacgggcctgagctcggcgaatagctcgatcgcctcgctgtcgacctccacgtcgaccggtatcggttcgctctccaccggtctgtccacgaccgatagcaccgttgcctcgctgtccacctcgacctcgaccggtctgagctcggcgaatagctcgatcgcctcgttgtcgacctccacgtcgaccggcatcggctcgctctccaccggtctgtccacgaccgatagcaccgtcgcttcgctgtccacctcgacctcgaccggcttgagctcggccaccagctcgatcgcttcgctgtcgacctccacgtcgaccggcatcggctcgctgtccaccggcctgtccacgaccaacagcaacgtcgcttcgctgtccacctcgacttcgaccggcttgagctcggccaccagctcgatcacctcgctgtcgacctccacgtcgaccggcatcggctcgctttccaccggcctgtccacgaccaacagcaacgtcgcctcgctctccagcggcctgagcagcacgaatagctcgctgacctcgctgtcgacgtccgcttcgtcgggcatcagcaccgcgcagagcggcgtcaattcgttgtccaccgggctgtcgaccgcgaatagcaccgtcgcttcgctgtccacgtcgacttcgacgggcctgagctcggcgaacagctcgatcgcttcgctgtcgacttccacgtcgaccggcatcggctcgctttccaccggcctgtccacgaccgatagcaacgtcgcctcgctctccacgtcgacttcgaccggtctgagctcggcgaatagctcgatcgcctcgctgtcgacttccacgtcgaccggcatcggttcgctgtccaccggtctgtccacgaccgatagcaccgttgcttcgctatccacctcgacttcgaccggcctgagctcggcgaatagctcgatcgcttcgctgtcgacctccacgtcgaccggcatcggttcgctttccaccggcctgtccacgaccaacagcaacgtcgcttcgctgtccacgtcgacttcgaccggtctgagctcggccaccagctcgatcgcctcgctgtcgacctccacgtcgaccggcatcggctcgctgtccaccggcctgtccacgaccaacagcaacgtcgcttcgctgtccagcggcctgagcagcacgaacagctcgctgacctcgctttcgacttcagcttcgtccggcatcagcaccgcgcagagcggtgtcaattcgttgtccaccgggctgtcgaccaccaatagcaccgtcgcttcgctgtccacctcgacctcgaccggcttgagctcggccaccagctcgatcgcttcgctgtcgacctccacgtcgaccggtatcggctcgctttccaccggcctgtcgacgaccaacagcaacgtcgcttcgctgtccacctcgacttcgacgggcctgagctcggccaccagctcgatcgcttcgctgtcgacctccacgtcgaccggtatcggctcgctttccaccggcctgtcgacgaccaacagcaacgtcgcttcgctgtccacctcgacttcgacgggcctgagctcggccaccagctcgatcgcttcgctgtcgacttccacgtcgaccggcatcggctcgctgtccaccggtctgtccacgaccgatagcaccgttgcttcgctgtccacgtcgacttcgaccggtctgagctcggccaccagctcgatcgcttcgctgtcgacctccacgtcgaccggtatcggctcgctttccaccggcctgtccacgaccgatagcaccgtcgcttcgctgtccacgtcgacttcgaccggcctgagctcggccaccagctcgatcgcttcgctgtcgacttccacgtcaaccggtattggctcgctctccaccggtctgtccacgaccaacagcaacgtcgcttcgctgtccacctcgacttcgacgggcctgagctcgaccaccagctcgatcgcctcgctgtcgacctccacgtcgaccggtatcggctcgctgtccaccggcctgtccacgaccgatagcaccgtcgcttcgctgtccacctcgacttcgaccggcttgagctcggccaccagctcgatcgcttcgctgtcgacctccacgtcgaccggcatcggctcgctctccaccggcctgtccacgaccaacagcaacgtcgcctcgctgtccagcggcctgagcagcacgaacagctcgctgacctcgctgtcgacttcagcttcgtccggcatcagcaccgcgcagagcggtgtcaattcgttgtccaccgggctgtcgaccaccaatagcaccgtcgcctcgctgtccacgtcgacctcgacgggcctgagctcggcgaatagctcgatcgcctcgctgtcgacctccacgtcaaccggcatcggctcgctctccaccggcctgtccacgaccaacagcaccgtcgcgtcgctgtccacgtcgacttcgaccagcatcggttcgctgtccaccggcctgtcgtcgaccaacagcaacctcgtgtcgctctccacgtccgcctcgaccggcatcggctcgctgtcgaccagcatcgacacgaccaacagcaacctcgcgtcgctctccacgtccgcctcgaccggcatcggctcgctgtcgaccagcatcaacgcgaccaacagcaacctcgcgtcgctctccacgtccgcctcgaccggcatcggctcgctgtcgacgagcatcagctcgatcacgacgaacacgacgaacctcggcaacagcaccgccgcggcgctcggcggcggcgcgacgtacgatccggccaccggcgcgatctccgcgccgtcgtacacgacgtacaacgcgaacggcaccaccgcgaccaacaccagcgtcggcgccgcgatcgacaacatcaacgcgaacggcatcaagtacttccacgcgaactcgaccgatccggacagcgtcgcgaccggcacgaacagcgtcgcgatcggcccgaacgcggtcgcgaacgtcgactactcggtcgcgatcggcagcggcgcgacgacctcggcggccgtgcccgtcgcgtcggcgagcgtcggcggcctcacgttcggcggcttcgcgggcagcgcgcccatcggcgtgttcagcgtcggcgcgccgggcgcggaacgccagatcacgaatgtcgccgccggccgcatctccgcggccagcaccgacgccgtcaacggcagccagctctacgcgaccaacagcaatgtcgcgtcgctgtcgaccggtctgaacgcgacgaacagcaacctcgcgtcgctgtccacgtccacctcgaccgccgtcggctcgctgtccaccggcctgtccacgaccaacagcaccgtcgcctcgctgtccacgtcgacctcgaccagcatcggctcgctgtccaccggcctctcgaccgcgaacagcaacctcgcgtcgctgtccacgtccacctcgaccggcatcggctcgctgtccaccggcctcgcgacgaccaacagcaatgtcgcgtcgctgtcgacgagcgtgaccaacatcaacacgcagctcacgtcgctgtcgacgtcgatcacgaacaacgtgatccggtcgctgcccgcgagcaccggcgtcgccgcggacatgagcgcgccgaaggcgacctcgccgtccgtcacggccggctcgaactcggtcgcgctcggcgcgggctcgaacgacggcggtcgctcgaacgtcgtgtcggtgggcagcgacacgcagcagcgccagatcacgaacgtcgcggccggcaccgagggcaccgacgcggtcaacgtcaaccagttgaatacgctgtcgacgtcgatgtcgcaatcgctgtcgaatcagcaaacgcagctcaacaatctcggctcgcaactgaaccagacgcagcagcaactgcagcagaccgacacgatggcccgccaggggatcgcggcggtcgcggcgatggcgtcgattccgcacatggaccgcgactcgaacttcgcgatgggcgtgggcacctcttcgttcctcggccagaaggcgatcgcggtcggcatgcaggcgcgcatcaccgagaacctgaaggcgtcgctgaacggcggcttcgccggcaatcagaaggtcatcggcgcgggcatgctctatcagtggaagtaa

SEQ ID NO: 1114 - DNA, 4593 bp, Burkholderia pseudomallei
atgaacaagatctataaaaccatctggtgcgagaccacgcggagctgggtcgcggtttccgagcacgcaaacggcaagcgcggcggcgcgacggcggccgcgacgacttccgcgcgtccgatctggacgcggctgcgcggcatctcgctcgccgcgctggcagcgttcggcctggggctcttcgcctcgcccgccgcgttcgcgcagtcgaattcggtgatgtgcgcgaactacaacaacggcattcttccgacctataccggttacggcgcgagcccttcgctcacctcgccctgcacgacgggcatcggctcgtgggcgggcggcgtcacgcccggctcgacgaccaactggatcggcctgtccgccgacgacacgcaaatcgtcctgaacggcagcaccggcaatatctatttccgcgcgggcggcacgaacggcaacacgctgacgatgagcaacgtcgcgggctcgggcccgacgggaggcgtgctgctgtcgggcgtcgcggcgggcgccgtgacggcgacgagctcgcaggcgatcaacggcagccagctctattcgctgtcgacctcggcatcgacgggcatcggctcgttgtcgagcagcatgtcgacgttcaacagctcgatctcgtcgctgtccaccggactgtcgtcgacaaacagcggcctgacctcgctttccacttcggcgtcgacgggcctgtcgtcggcgaacagctcgattgcttcgctgtcgagcgggctgagcagcacgaacagctcgctgacctcgctttcgacgtccgcttcctcgggcatcagcaccgcgcagagcggcgtcaattcgctgtcgaccggactgtcgacgaccaatagcacggtcgcttcgttgtccacgtcgacctcgaccggcatcggctcgctttccactggcctgagcagcacgaacagttcgttgacctcgctttcaacgtccgcctcgtcgggcatcagctcggccaatagctcggttgcttcgctgtccacgtcgacctcgaccggcatcggctcgctttccaccggcctgagcagcaccaacagctcgctgacctcgctttcgacgtccgcttcctcgggcatcagcaccgcgcagagcggcgtcaattcgctgtcgaccggactgtcgacgaccaatagcacggtcgcttcgttgtccacgtcgacctcgaccggcatcggctcgctttccactggcctgagcagcacgaacagttcgttgacctcgctttcaacgtccgcctcgtcgggcatcagctcggccaatagctcggttgcttcgctgtccacgtcgacctcgaccggcatcggctcgctttccaccggcctgagcaccaccaacagctcgctgacctcgctttcaacgtccgcctcgtcgggcatcagctcggccaatagctcggttgcttcgctgtccacgtcgacctcgaccggcatcggctcgctttccaccggcctgagcaccaccaacagcaacctcacgtcgctgtcgacctccacgtcgacggggctctcgtcggccaacagctcgatcacctccctttcgagcgggctgagcacgaccaacagcaacgtcgcctcgctgtcaaccggcctgagcagcacgaacagctcgttgacctcgctttcaacgtccacctcgtcgggcatcagctcagccaatagctcggttgcttcgttgtccacgtcgacctcgaccggcatcggctcgctttccaccggcctgagcaccaccaacagcaacctcacgtcgctgtcgacctccacctcgaccggcctctcgtccgcgaccagctcgatcgcttcgctgtccacgtcgacctcgaccggtatcggctcgctttccaccggcttgagcaccaccaacagcaacctcacgtcgctgtcgacctccacgtcgacggggctctcgtcggccaacagctcgatcacctccctttcgagcgggctgagcacgaccaacagcaacgtcgcctcgctgtcctccggcctgagcagcacgaacagctcgttgacctcgctttcaacgtccacctcgtcgggcatcagctcagccaatagctcggttgcttcgttgtccacgtcgacctcgaccggcatcggctcgctttccaccggcctgagcaccaccaacagcaacctcacgtcgctgtcgacctccacgtcgacggggctctcgtcggccaacagctcgatcacctccctttcgagcggactgagcacgaccaacagcaatgtcgcctcgctgtccaccggcctgagcagcacgaacagctcgttgacctcgctttcaacgtccacctcgtcgggcatcagctcagccaatagctcgattgcttcgttgtccacgtcgacctcgaccggcatcagttcgttgtccaccggcttgagtaccaccgacagcaatctcacgtcgctgtcgacctccacgtcgacggggctctcgtcggccaacagctcgatcacttccctttcgagcgggctgagcacgaccaacagcaacgtcgcctcgctgtccagcggcttgagcgccaccaacagctcgctgacctcgctttcaacgtccgcctcgtcgggcatcagctcagccaatagctcggttgcttcgctgtccacgtcgacctcgaccggtatcggctcgctttccaccggcttgagcaccaccaacagcaacctcacgtcgctgtcgacctccacctcgaccagcctctcgtcggccaacagctcgatcacttccctttcgagcggactgagcacgaccaacagcaacgtcgcctcgctgtccagcggcttgagcaccaccaacagctcgctgacctcgctttcaacgtccgcctcgtcgggcatcagttcagccaatagctcgattgcttcgttgtccacgtcaacctcgaccggcatcagctcgctgtccaccggtttgagcaccaccgacagcaacctcgcctcgctgtcgacttccacgtcgaccggcctctcgtccgcggccagctcgatcgcttcgttgtccacgtcgacctcgacgggcatcagctcgctgtccaccggtttgagcaccaccgacagcaacctcacgtcgctgtcgacctccacgtcgacggggctctcgtcggccaacagttcgattacctccctttcgagcggactgagcacgaccaacagcaatgtcgcctcgctgtccagcggcttgagcaccaccaacagcagcgtcgcgtcgctctcgaccggcctgagcaccaccgacagcaacctcgcctcgctgtcgacctccacgtcgaccggcctctcgtcaacaaccagctcgatcgcttcgctgtccacatcgacctcgacgagcgtcgactcgctgtccaccggcctgagcaccaccaacagcagcgtcgcatcgctctcgaccggcctgagcaccaccgacagcagcctcgcctcgctgtcgacctccacgtcgaccggcctctcgtcaacaaccagctcgatcgcttcgctctcgacgtcgacctcgacgagcttctcgtcggcgctgagctcgatcggctcgctgtccaccggcctcgcgacgaccaacagcaatctcgcgtcgctgtccacgtcgacgctcacctccgtgagctcgctgtccaccggcctgagcgccaccaacagcagcgtcgcgtcgctgtcgacgtccgcctcgaccggcctcgccgcaaccaacagcacggtcgcctcgctgtccacatccacctcgacggccgtcggctcgctgtccaccggcctgtcgaccaccaacagcaacgtcgcctcgctgtccacgtccacctcgacggccgtcggctcgctgtccaccagcctgtcgaccaccaacagcaacgtcgcgtcgctgtccacgtcgacttcgacaagcgtgaactcgctgtccaccggcctgtcgacgacgaacacgagcgtcgcgtcgctgtcgacgagcgtgaccaacctcaacacgcagctcacgtcgctgtcgacgacgatcgtcaacagcacgaacaacgtgatccgcgcgctgcccgcgagcacgggcatcgccgccgacatgagcgcgccgaacgccgccgcgccgtccgtcacggccggctcgaactcggtcgcgctcggcgcgaactcgaccgacggcggccgctcgaacgtcgtctcggtcggcagcgccacgcagcagcggcaaatcacgaacgtcgccgccggcaccgaaggcaccgacgcggtcaacgtcaaccagttgaatgcgctgtccacttctatgtcacaatctctggcgggccagcagggccagatcaacaatctgggctcgcagctgacccagactcagcaagcgctgcagcagaccgatacgatggcccgtcagggcatcgcggccgccaccgcgctgacgatgctgccgcaggtcgagccgggcaagacgatcaatgtcgccgtcggcgtcgcccgcttcgcaggtcagtcggggatggcgttcggcgcgagcgcgcacgtgacaaccaacggcattctcaaactgggcatcggcgtgtcggggcagaacaagaccttcggtgcaggatatggatatagctggtga

SEQ ID NO: 1115 - DNA, 1551 bp, Burkholderia pseudomallei
atgcacgccaaagcttcctccagccacgcgcccgacgcgcccaagcccagctccattgccaccacgctctgccgggcgcttgcatccctttccctcggcttgtcgatggacgccgaggccaatccccccgaaccgccgggcggcaccaacattcccgtgccgccaccgatgccgggcggcggcgcaaacattcccgtgccaccgccgatgccgggcggcggcgcgaacatcccgcccccgccgccgcctcccggcggcattggcggcgcaacgccctcgcccccgccgctcacaccggtcaacggcaacccgggcgcgagcacgccgaccaagaccggtctgctgaaaacgctcaatcggttgtccgcggagcttcagaacaacccgcgtgtaaccgaggacgtagtcgacaacgtggacgcggtcatccgaaacgccgtcaatctggcgcccgatgcgaacggggacttctccggccgctcggcgatgccgatcgaaatggccgcgaacgccgcgctgagatcgctgaagaaaaatccgggcgacgccggccatgccgctccggcatacctgcctgccgagcggatcggccagttgcgggaaaaggtccgaaggaccatcgaggcgctcgaatcgaaccgcccaccgaaaccgcagccgcggtcgacaccaccgcaatcgacgccacccaagccgacgcagcacccgaccgcgcccaacccgaacgtacccgacgcatcgacgcctgatgcatcgacgcctgacgcttcgacgcccgacgcatcgacgcccgacgcatcgacgcccagccgacctgcccctgccccccgagcgggcacgggcgcgcccgctgcttcggcggcgacgcgcgcccccgcctttgcaaaccgcgtgcgcaagccgaatccggctatgcccgccgcgtcgtcgcatgcgatcgcgagcgacttcgcgtcgagcaacgcgttcgcgatcggcgacgactcgaccgccgtcggagcgcaagcgatcgcgttcagcgagcaatcgatcgccataggctcgcgcgcgattgccgccggcgcccgttcgatcgccgtcggcacggacgcgacagcagccgcccccgattcggtcgccctcggctcgggctccatcgccgaacgcgaaggcacggtgtccgtcggcagagacggccacgaacgccagatcacccatgtcgcatccggcaccgagcccaccgacgccgtcaacgtcacgcaactgcgcgcggcaatgtcgaacgccaacgcgtacacgaaccagcgcatcggcgatcttcagcagagcatcaccgacaccgcgcgcgacgcgtattccggcgtcgccgccgcgaccgcgctgacgatgattcccgatgtcgaccgcgacaagagggtgtcgatcggcgtcggcggcgcggtctacaagggccatcgcgccgtcgcgctcggcggcaccgcgcgcatcaacgaaaacctcaaggtgcgggcgggcgtcgcgatgagcgcgggcggcaatgccgtgggcatcggcatgagctggcaatggtaa

SEQ ID NO: 1116 - DNA, 786 bp, Burkholderia pseudomallei
atgacttacaacccgagaatcggcggattcacgcacgtcaagcaggcgtcgttcgacgttcacgtcaagcgcggcgaagcgcagccgcgcacgtcgttcgcacaacagatcaagcgcatcttcagcaagatcggcgaaacgctcgggcaactgttccgccaccgcgcgccggacagcgcgcccggccgggtcaggctgcagggcgtgcgctacgtcggcagctatcggcccacgggcgacgcgaaacaggcgatccggcatttcgtcgacgaagcggtcaagcaggtcgcccacgcgcgtaccccggagatccggcaggatgccgaattcggccggcaagtctacgaagcgacgctctgcgcgatcttcagcgaagcgaaggaccggttctgcatggacccggccacgcgcgcgggcaacgtgcggccggcgttcatcgaggcgctcggcgacgcggcgcgtgcgacggggctgcccggcgccgacaagcaaggcgtgttcacgccgagcggcgccggcacgaatccgctctacaccgagatccggctgcgcgccgatacgctgatgggcgccgagctggccgcgcgcccggagtatcgcgagcttcagccgtatgcgcggcagcaggcgatcgatctcgtcgcgaacgcgttgccggccgagcgttcgaacacgctcgtcgagttccggcagacggtgcagacgctcgaagccacataccgccgcgcggcacaagacgcgtcgcgcgacgagaagggcgcgacgaacgcggcggacggcgcgtga

SEQ ID NO: 1117 - DNA, 291 bp, Burkholderia pseudomallei
atggcgacatacaaggaactgaaggctcgggccgaggcgctgagcgcgcaggccgaagcggcgcggcaggctgaattgcaggccgcgatcgaagacgtgcgcgcgaaggtgcgcgagtacggtctcacggcgtacgacgtgttcggacaccgaaagaagccgggcgagcgccatcgcggggcggtcaggccgaagtaccgcgatccggcgacgggcgcgacctggaccggacgcggcatcgagccgaaatggatccggggccgcaatcgggacgaattcctgatcgaatga

SEQ ID NO: 1118 - DNA, 1236 bp, Burkholderia pseudomallei
atggccgagaaaaccgagaagccgaccgcgaagaagctgcgcgacgcggcgaagaaggggcagacgttcaaggcgcgggacatcgtcgcgctcatcgtgatcgccacgggcgcgctggccgcgcccgcgctcgtcgatctgacgcgcatcgcggccgaattcgtgcggatcgcgtcgacgggcgcgcagccgaacccgggtgcgtacgcattcgcgtgggcgaagctgttcctgcgcatcgccgcgccgttcgtgctgctctgcgcggcggcgggcgcgctgccgtcgcttgtgcaaagccgcttcacgctcgcggtcgaatcgatccgcttcgatctcaccgcgctcgacccggtcaagggaatgaagcggctcttcagctggcgctcggcgaaggacgcggtgaaggcgctgctctatgtcggcgtgttcgcgctcacggtgcgcgtgttcgccgatctctaccacgccgacgtgttcgggctgttccgcgcgcgtccggcgctgctcggccacatgtggatcgtgctcacggtgcgcctcgtgctgctgttcctgctgtgcgcactgcccgtgctgatcctcgacgccgccgtcgaatacttcctgtaccaccgcgaactgaagatggacaagcacgaggtgaagcaggaatacaaggagagcgagggcaatcacgagatcaagagcaagcggcgcgagattcatcaggaactgctgtcggaggagatcaaggcgaacgtcgagcagtccgatttcatcgtcgcgaacccgacccacatcgcgatcggcgtctacgtgaatccggacatcgtgccgattccgttcgtgtcggtgcgcgagaccaacgcacgcgcgctcgccgtcattcggcatgccgaagcgtgcggcgtgcccgtcgtgcgcaacgtcgcgctcgcgcgctcgatctatcgcaactcgccgcgccgctacagcttcgtgagccacgacgacatcgacggcgtgatgcgcgtgctgatctggctcggcgaggtcgaggcggccaatcgcggcgggccgccgcccgagacgcgcgcgccgacttcggccgagccgcaagcgcgcgacggcgtggccccgccgggcgacgcctgcgcggacaacgcctttcccgacgacgccccaccgggcgccgctgcgccgaacgccggttcgccggacggcccggcgccggacggcggcgcgccggcccgaacgggcgatcaaaacgcttga

SEQ ID NO: 1119 - DNA, 756 bp, Burkholderia pseudomallei
atggatgtcttgatgcaagcgttctaccggcacgccggcgcgatcgcgatcgcgtacgcgcgcgtcgcgccggtgttctatctgctgccgttcctgaacgaccggacgatcgtcaacggcatcgtgaagaacacgatcgtgttcgcgatcatcctcgggctgtggccgagcttcgcgcatccgccgctgcaaggcggcgcgctcgccggcgtcgcgctgacggaggcggctgcgggcgtcgtgctcggcgtcgcgctgtcgctgccgttctgggtcgcgacggcgttgggcgagctgatcgacaaccagcgcggcgcgacgatcagcgattcgatcgacccggcgacgggcgtcgaagcgtcggcgctcgcgccgttcgtgagcctgttctatgcggccgcgttcctgcagcagggcggcatgctgacgatcgtcggcgcgctcgaggcgagctacgcgacggtgcccgccggcgcgctgttctcggtcgatctgccgcgcatcggcgcgctgttgaccgatctcgtcgcgcacgggctcgcgctcgccgcgcccgtgctgatcgtgatgttcgtcaccgatgcgctgctcgggctgttctcgcgcttctgcccgcaggtcaacgcgttctcgctgtcgctgacggtcaagagcatcgtcgcgttcgccgtgttccacctgtacttcgtatacgcggcgccgcacgagctgacggcgctgctgcgcgtgcatcctttcagcagcctggtgaagtga

SEQ ID NO: 1120 - DNA, 1863 bp, Burkholderia pseudomallei
atgatgtatgccgacacggccagacgatacgcagccgcgcttgccgcgtcgctgctgatgacgggcgcggcgttcgccgcgccgaccgacgcggcgccgctcgccgacgcgcccgcggcggcgagcgcgacgcccgacgcgcgggacggcgacgcgtcgcgcgtggccgcgccgcaggacgacgagcgccacttcgtcgcgaacgacgcgagcatcagcgtgctgctcaatgcgctgtcgggccggctgcacaagccgatcgtcgcgagcgagaaggtgcgccgcaagcacgtgacgggcgagttcgacctcgcgcagccccgcgcgctgctcgcgcggctcggcgaatcgatgtcgctgctctggtacgacgacggcgcgtcgatctacatctacgacaactcggagatcaagaacgcggtcgtctcgatgcgccatgcgacggtgcgcaacctgcgcgatttcatccggcagacgcggctctacgatccgcgctttccggtgcgcggcgacgacctgagcaacacgttctacgtgacgggcgcgcccgtctacgtgaatctcgtcgccgccgccgcgcgctatctcgacgaggtgcgctcgaacgaggcgagcgaccggcaggtcgtgcgcgtcgtgcagcttcacaacagcttcgtcgtcgaccgccagtacacgctgcgcgacaaggaagtcgacatcccgggcatggcgaccgtgctcggccgcatcttcggcccggcgcggccgggcgcgccggcggactcgcccgtcgcggcggccgacgccacggcgcgcggcggcgcgggcggcgcggcgggcaagccggcgttctcgcttgccgatgcgttgcccgcgccgctcgacgccggcaacgcgccgggcggcgcgggctcgacgcattcgacaaacccggcgaacgccgcgagcccgatgggcggcgcggcgggcggcgtcgcgctgcccgcgtcggacggcgtgcgcgcggtggcgtatccggacacgaacagcgtgatcctcgtcggccggctcgacaaggtgcaggacatggaggcgctgatccgctcgctcgatgtcgagaagcggcagatcgagctgtcgctgtggatcatcgacatccgcaagagccggctcgatcagctcggcatcgactggcagggtgcgctcaatgcgccgggcatcggcgtcggcttcaacaatcgcggcggcaacgtgacgacgctcgacggcaccaggttcctcgcatcggtcgcggcgctcagccagacgggcgacgccaccgtgatctcgcggccgatcgtgctcacgcaggagaacgtgccggcgacgttcgacagcaaccagacgttctacgcaaagctgatcggcgagcgcacggtgcagctcgatcacgtgacctacggcacgctcgtcaacgtgctgccgcggctcacgcgcgatgggtcgcaggtcgagatgatcgtcgacatcgaggacggcaacaccgacggcgcgacgagcgacggccagatcgtcatcgacaacaacacgatgccgctcgtgaaccgcaccgagatcaacacggtcgcgcgcgtgccgcacgagatgagcctgctcatcggcggcaacacgcgcgacgacgtcacgcgccgcacgttccggattcccgggctggccagcattccgctgatcggcgggctgtttcgcgggcattcggatcggcacgagcaggtggtgcgcgtgttcctgatccagccgaagctgctgcgcgcgggcgcggcctggcccgacggccagccgtgggaatcgggcgatccggcggacaacgcgacgctgcgcgcgaccgtgcagatgctcaaaccctacatggacgacaagtcatga

SEQ ID NO: 1121 - DNA, 642 bp, Burkholderia pseudomallei
gtgtcgttcggcgcgatgtcccatgccgtttcgatcgacaagaataaatcggcgctggttatcggcatcggtcaattcaaaatcgcgtcgcgtgaaggcgcatggcgttttcatgacgtgccgttattcgaggcggcgaaattgctcgcttttctggaaagctgcggcgcgccggacggcgccggccgcgaatatcgcgcgggggcgccggacggcgcggtgatcgacgcgcccggcgatctgagcatctggaaattcgaccgctggctgatcgcccgcgtgatgggcgcgccgcacggcgccgatccgctgttcgcgttcctgcgcgcgcaggagagctacgggctcgtgcgcttcttgctgcgcgagcgtgcgaacccgcagccgatcgccgcgcttgccgcgcgctacggcgtgtcggagccgcactttcgccggctgtgccggcaggcgctcggccgcggcctgaagcgcgagcttcggcaatggcgcgccgcgcaggcggtgctcgaggtggtcgagagccgcgacagcatgaccgaggtcgcgatgagcaacggcttcgcgtcttcgtcccacttctcgcgggaaatcaaggacttgttcggcatttcgccgtgccggttccgtcgccggacatga

SEQ ID NO: 1122 - DNA, 1287 bp, Burkholderia pseudomallei
atgaataaaccagattccggacttgaagctctgcaactccgaatcctgttcggtccgctattcggctcggatatcgcgattctgtcaggggaagtatttttctgcgtcggcgagcaggtgatcgacgatcgtccggcggagcatccggaaaatcgcgccggccatttactggagcgcgcggtcgatacgctgtatatcccgcaccgggccggcgcgccgaatttccgcctgcgttttccgggcgcgccgacgcaggcggcgcgaaccgccgaaaccggcgaagccgcgcccggcgatttcgaagtcgattttctgtcggcggacggttgcgtcacgcaacgcgcggcattcaacaccgtctgccgcttcggcgatctcgcgttcgcgctcaggcgtcagcgcgagccatggagcgaggcggtcatgcactacgcgccgcacgcgccttcgcgtgcggcggacgccgccgagccgggcgcgcccggtgagcccggcgatggcggcgagcgcgcatcgcgcttcgcgctgaagctcggcgcgctgctcgtcgcgggggtcgcgctcgcggcgctcgcgtactggcaggtgcagcgctatgtcggcgcgcagaagctcgcgagcgtcaacggcgtgctggcgggcgcgcccgtgcccaacgcgatcctgcccggcgacgacggccggatctacgtgctgagcgcatcgcaggacggcgccgaatgggaccgcgaggcgctgctgaaggcggcgctgccggagaagatcgaagtcgccgtgatcggcgcggagcggcaacgcgtcgagcgccggctcgacgaagccggcgtcgatttcgtgaccgtgcgcctcgacgcgcccgagcacccggagctgatcctcaccggcgccgcgcccgccgccgcgcgcgcacgcgcgatcggcgagctgcggcgcgcggccccgtacgtccgggacgtgcgcgtgatcgacgcgagcctcggcgcgatcgagcaggaggcgcgcaacgcgctcgacaaggtgggcgcgcgctaccggctgctcgcgcggcgcggcggcgcgacgttcgaggtggcgagctcgttcggcgacgaggagctcgccgccttgcagaacctcatgcgctcgttcggccacaagtggggcacgcgccgcgtcgatttcaagatcgcgctgcgcaccgactggctgaagggcaaatcgtatcgggaaggcggcgacggctacgtgctgctcgatcacgcgtcctggtatttcccgcaacccctggaaggagcacattaccgatga

SEQ ID NO: 1123 - DNA, 885 bp, Burkholderia pseudomallei
atgcgaaagccggcgcatgcccgcttcaatcacgatagctccgcacggtcggcatcccgcccgaacccgccggcgcgcgttttcggcgatgatccggtgcgtgcgcgagcgcggcggcccgcccgcatcgccgtgcaccgccgtcgacctcgaaccgtccatcgtcaacgcgccgtcaaccgccgccgcgcggcgcgcttcgcgcatgcgcccggcgcgcacggcccacgcccgaacatgatcgccgatcccgtcctgcatacgctgctgctccgaaccggccactggctccgtcgtcacacgcgcggcttctcgcgctcggatttctggcccggccgcgcgttcctcgaagcgttcacggtcctcgccgcctgggtgctgcccgcgatcgcgggcgtcgtcgcgaccggctggctcggcggccaccgctcggtcacgtatcttcaggcagcgatccaggaaggcatcggcccgcacatctggaacgtgttcggaacgctcggcgcggttctcttcggtctgctcgtcgccgcgccaacgcagagatggctcgcgctcgccgcgcatcaggtgatgctcaacgcctattcgctcggcgcgctgatgctgggcctgctgctcggacaatggatctgcatcggcgcgccgccggcgtccggcctccttcatgcgtcgctgcgcacggccgggatcggcgcgctgttctcgatcgccttcgggctgaacctcgctgtctggtacgtcgcgtttctcgcgtcgcccaagcgcctgcataccggcttcatgctgaagatcgcgcagtgcgcgccgcagtttcgcgtgccgctcgccgcgacgatcgtgacggcggcgctcgcgtcgctctatctctatctcggccgatga

SEQ ID NO: 1124 - DNA, 1674 bp, Burkholderia pseudomallei
gtgctttcgcgccgccgcgcgcgcggcttcgcgctgatcgagatgctcggcgcgctcgccatcgccgcgctgctgctcgccggcatcgcggcgatgatggacagctcgctcgacgacgtgcgcgcgcagcaggccgcgcaataccaggcgcaggtgacggccgcggccacgcgtgcgctcaagcgtgactacgacgcatggctgcagcgcgcgaacgcgcagacgcccgtcgtgatgacgcttgccgatttgcaggcgacgaacgatctgcccgccgcgctacagacacgcaacgcgtacggccagcacacgtgcgtgctcgtcaagcgcaccgcgaacggcgtcggactcgacgcgctcgtcgtgacgacgggcggcgaggcgatcggcgacaaggagctcgggctcgtcgccgcgagcgcggggccgggcggcggctcgatcgccacgagcgcgcccgcgctcgcgcgcggcgcgttcgacgcgtggcgcatgccgctcggcgcctacctcggcggcagctcgccgacgtgcgatccggccgacgccgcgccgccgaacgccggccatctcgccaacgagatcttcttcaacgggccgggccagcagatcaacagcgattacctgtaccgcgtcggcgtcggcggccatccggaggcgaacgcgatgcaggtgccgatctggctcacgcacacgttcgtcgaaggcgccgccgacgcggcgaactgcggcgcggccggcagctatgcgaacggcaagctcggcgcggacgcggccggacagttgctgagctgcaggaacggcgtgtggcgcggcgccggcggtcactggaaggacccggtcaggacggccgacgatctgcccaccgacgcatcgaacgaaaccggcgacgtgcgcctcacgctcgacacgttccgcgcgttcgcgtggacgggcaacgcgtggcaggcgctcgccgtggaccagaacggcaacatgatcgtgccgggcgtcgtctccgcgaaccagtacgagatcaccgggcgcgtcgtcgtcaacacgccgtgcgcgccggagccgagccggccgaacgcggggctcgtgtctatgggccaggacgggcaggtgctgtcctgccagggcggcaagtggctgccgcaatcggggatcaagatcggcggcaccgaaacggcgtgcgagatcctgatggagacgcccggcgcgacggatttctcgtgcgggtacacctaccgcggcccctatccgaatccgccgctcatcacctacgagcccgacggcacgtacacgtacacgatcaaccggccggtgaagctcgacaacaacgggctcatcgcggtgagcgcgtacatgcacatgagctacgcgacgtgcgcgctgaaagggcgggaaggacagatgcgtctcgtcgtcgacgtgatcgacgttcagagcaaccaggtgatcgcgcacggcgaggcgcagtcgacgaagctgatcgaggacgccgcgacgatcaacgtcacgctgaatcaggccgccgagccgcgcagcggctacacggtcaggctgtcgagcaagtgggcgacgtacgacagctacgcgggcacgccgtggacgtcgagctattgcagcggcggcaagacgtttctccagacgccgctcgtgaccggctggacgatcaattcgttctattga

SEQ ID NO: 1125 - DNA, 1299 bp, Burkholderia pseudomallei
atgagcgcgcaggtgattcaaatcggccgccagcgtttcgtcggcggcctgttctggcaatcgttgtcgaggcgcaacgagttgcgcgccgaagcggtcgagctcgcgaagaaactgaagttcgacctgatggtgctgcgcatcgatcgcggcgtcgcggcggcgggctacgcgaacacgcgcgacggcttcgcgcccgggcatctgtcgctcggcgcgatggtgtcgcgcgcgatcgcgctggagggcgcgttctacaacggccggcgtcagcccgcgccgaactggctcggcgcgtttgcgctgcccgacgggcgctgggcgtacttcgcggtgcgcgaccacgcgttcatgccgaacggcgactgggtcggcagccgcgaggaggcgctcgagcggctgcataccgattacgcgtggggcggctggaacgtcgtgatcggcgagccggagctcgagcggcagggcttccagaattttcagccgaagcggctcgacgatctgctgccgcgccgcggcggccggccgcgcaccgagcgctggtgggcgcttaggcccgtcgagcggcgtctgtcgccgcgcgccgcgctgatcgccgcgacggcggcgtgcgtcgtgctcggcggcgcgttcgcgtactggcatcatcgcgcgaaggtcgaggccgaggagcgcgaggcggcgctcgagcgcgtgcgcgcggagctcgccgcgcggcaggcgagaagcggccccgtcgcgccgccgtgggcggcgctgcccgacgcgctcgcgttcgcgcgcgcgtgcgcgatgcgcttcgggcggctcgcgccgggcggctggcggctcgaacgctacgagtgcacgccgggcaccgcgcactacgcgtgggcgcgcaacggctcgaacgtgcgctacctgctcgtggtggaacccggcgcgacgctcgataccgacggcgagcgcgcgacgctcgacgtgccgctcaccgcgccgacggcgaacgatacgccgctcgccgacgattcggttgtcaggacacaacttctcgcgcgtctccaatggctcgacgcggccgctaaactggagcggctgcttcccgaacaggggccgcgcgcgccgctcgcgaatctcgcgcaacaggcggccgccttgcccgcttcgcccacgtggcgcgcgtaccggctgaacgcgaatctcggcggcatcgcgccgccggagttcgtgcgcgcgatcgacgtgccggggttgcgcgtcgagcgcatcgcttaccagaacaatcagtggaccctcgaaggagtgctctatgcgaaatag

SEQ ID NO: 1126 - DNA, 1770 bp, Burkholderia pseudomallei
atgcgcgtgctgttcgccatttcattgctggccgtcgcatggctcgccggctgcaccggccttcgcggcggcatcgagcgcgacgcgcggcgcgattcgaacgaaaccggcgcgctgctcaagcgcgcatccgacggcgacaacagcgtgcgctcgctcgcgcccgtcgtcgtcgacaacgggctgtgggtgtccgcgggcaccgtcaagctgcgcaacagcgagcagttgccgccgctgttcgacgagccggcgtcgttcgatcgctcggtcgcttcgttgtccgaattcgccgagcagatcacgcgcctgacccaggtgccgacgcaggtcgccgcgagcgcgcagcaggcggccgcgcgttcgcagcacggcggcgcgggcgacgccgcgcgcggcgcgccggcctttctcgacgcatcgggcgcgcgcgcggtgccgccgctgccccccggcctgccgggcggcgcatcggcgggcggcggcaagacgggcggcggcgcggcgggcgcgggctcggagggcggcggcacgtcgttcgcgccggtgcgcgtgctgtacgcgggcggcacgctgcgcggcctgctcgacgcggcctgcgcgcgcttcggcgtgtcctggaagtacgagcagggggcgatccgcttcttcttcaccgatacccgcacgttccaggtcaacgcgattccgggcgactcgtcgctgaacgcatcggtcgtgagcggcgcgacgagcgacggcgccgcgggcggctcgcagtcgggcggctcggggggctcgggcggcggcatcaacggcgcgggctccggcacgacgggcctcaccgcgaacaacacggcgaacaccgcggtgaactcgcagctgtcggtgttcaacggcctgcaaagcgcgatccaatcgatgctctcgcgctacggcagctcggtcgcctcgcccgcgacgggatcgatctcggtgaccgacacgcccgacgtgctcgagcgcgtcgccgcgttcatggcgcagcagaaccgctcgctgtcgcggcaggtgctgctcaacgtgaccgtgctcagcgtatcgctgcaggcgggcgacgcgtacgggatcgactggaacctcgtctacaagacgatgtccgcggggttcggcatcaccaatccgttccatccgacggcgctgacggcgcccgccgacatgtccgcggcggtgctcagcccgacgagccgcttcaacggcacgaagctgctgatccgcgcgctgtcgcagcaggggacggtgcggcgcaagacgtcggcgtcggtcacgacgctcaacaaccagccggtgcccgtgcaggtcgcgacgcagacgggctacctcgcgtcggtgtcgacgacgaacaccgcgaacgtcggctcgtcgacggcgctcacgccgggcgtcgtgacgacgggcttcaacatgacgctgctgccgcacgtgctcgacgacggcaccgtgatgctgcagttctcgaccaacatctcgtcgctgctcgagctgaaggaggtgacgagcagcaccggcggcagcggcctggcgcgcatccagacgcccgacgtcgacatgcgcaacttcctgcagcgcgtcgcgatgaaatcgggcgagacgcttgtcatcagcggctacgaaggcgcgaacgattcgctcgacgagcgcggcgtgggcacgccgaagatgatcgcgctcggcggcggctacgaggcgcagcgcgcgcgcgaggtgatcgtgatcctgatcacgcccgtcacgcagcgcggcggcgcctga

SEQ ID NO: 1127 - DNA, 1446 bp, Burkholderia pseudomallei
atgttttcgacactctatttcgccgccgccgccgcgctcgccaatccgtcgtcgaacgacgcctacgccgcgcgcgtgctcgacggccgcttcgccgaagcggtcgcgctcgtcgccgcgcgttgcgactcgcagccgggcgatgcggctgccgacgtgcgcgacgttcatgcgtacgcggacatccagctcgtgctcgggcgcttcgaggaagccgaggacacgttccgccgcgcgcagaagctgctgcgcgaatcgcgcgaccagacgcgcgtgatgacctgccgcaacgcgagctggcaggcgttcttccagaaccgcttcggcgtggcgcaggccgggttccggcggatcgccgacgatcgcgcggcgagcgccgcgcagaagctcgagagcctcgtcggcacgtgtgtcgtcatgcatcatctcggccgcgccgaggacgcgatggcgacgctcgacgtgctcgacgcggccgcgcgcggcgacgccgatgggcgctgggtgcggctcgcggccgcgctgcgcgcggatctgctgctgcaataccagatcggccgcgccgacgcgctcggcgatcacgtgtactggcgctcggcgctcgccgagctgccgccggcggcgttcgcggaaacgggcgcgccgcacgccgcttgcgcggccgatgcgccgccgctgctgcgcatgcgcgtcgcctacatgcgcgagacgcgcgcgctcgccgcgggcgaccacgcggcgctggggcgaatcgacacgcacgtgagctggtgcgcgaaggcgggcctggccgactatcagcgcagcgtgcgcctggaggtcgcgctggccgcgcttgcgggccaggcgccgaacgtcgccgacgcgatgatcgcgccgtaccgcgaggccgcggggcgttgcggctcgcacgcgcgctggacgctcgactacctgtactgcgcggcgaaggtgcgcgagcaacaggggcggattcgcgaatcgtcgtcgctgtacgcgcactatgcgctcgcgtcggtgcggcacgtgcgctccgacggcgcggcgctcgcgccggcgctcgcgatcgcgcgctgcggcacgcaggcggccgcgccgagcgacgacgtgagcgcgaggctgcccggcaagtaccggcgcgcgtatcgctatctgatggagcggctcgaccagcgcgagctgtcggtgcgcgagatcgccgcgcacatcgacgtgaccgagcgcgcgctgcaggcggcgttcaaggcctatctcgggctgtcgccgagcgagctgatccgccgtcagcggatggagcggattcgcggcgagctgctgtccgacgcgccgcgcgcggcgagcgtgctcgagatcgcgagccgctggggaatccagcatcggtcgacgctcgtgaacggctatcggcgcatgttcgacgaggcgccttcgcagacgttcgaccgatga

SEQ ID NO: 1128 - DNA, 651 bp, Burkholderia pseudomallei
atggttcagtttaacgacatcaccggcctcttgatcgccgtgctcgtgatgagcatggtgccgttcatcgcgatggtggtcacctcgtacgcgaagatcgtcgtcgtgctcggcctgctgcgcaacgcgctcggcgtgcagcaggtgccgccgaacatggtgctcaacggcatcgcgattctcgtgtcgctgtacatcatggcgccgatcggcttcgccgcgcagcagcagcttcaggggcaggcgctgtcgccgcagccgacgcaggcgatgctgcaggcgttcggcgcggcgaaggagccgtttcgccggttcctcgccgcgcactcgcgcgagcgcgagaagcgtttcttcctgcgctccgcgtcggtgatctggccgcaggccgcggccgcgcaactgcgcgaggacgacctgatcgtcctcgcgcccgcgttcacgctcgcgcagatgaccgatgcgttccgcatcggcttcatcctctacatcgcgttcatcatcgtcgatctcgtgatcgcgaacgtgctgatgtcgatggggatgaaccaggtgcagccgaccaacgtcgcgatcccgttcaagctgatgctgttcgtcgtgatggacggctggtcgacgctcgtgcacggcctcgtgctgacctattcctga

SEQ ID NO: 1129 - DNA, 2073 bp, Burkholderia pseudomallei
atgacgctgaaatccctcaaacttcccgccggcggcgaggtcggcatcacggtgctcgtcgtcgcgatcgtctcgctgatgatcctgccgctgccgcccgaggtgatcgacgtgctgctcggcgtgaacatcgcgatcagcgtcacgctgctgatggtgacgatgtacgtcggcagcatcgtgtcgctgtcggtgttcccgtcgatcctgctgttcacgacgctgtaccggctgtcgctgaacatcgcgtcgacgaaatcgatcctgctgcacgcgaacgcgggcgacatcatcgagagcttcggcgagctcgtcgtcggcggcaatctcgtcgtcggcctcgtcgtgttcctgatcatcacgatcgtgcagttcatcgtgatcgcgaagggctcggagcgcgtggccgaagtcggcgcgcgcttcacgctcgacgcgatgccgggcaagcagatgagcatcgacgcggatctgcgcgcgaacatcctgacgccggacgaggcgcgccgcaagcgcgcgacgctcgccaaggaaagccagttgcacggcgggatggacggcgcgatgaagttcgtcaagggcgacgcgatcgccgggctcatcatcacgctcgtgaacatcgtcgcgggcatcgcgatcggcgtgatgtaccacgggatgacggcgggggacgccgcgaaccgcttctcgatcctgtcggtcggcgatgcgatggtgtcgcagattccgtcgctgctgatctcggtcgcggccggcgtgatgatcacgcgcgtcgccgacgatcacgacgacggcgacggcacgtcgctcggctcggagatcgccaggcaactgggcggcagccatcgcgcgctgtatttcgccgcggtgctgctgatcggcttcgcggcggtgcccggctttccggccgcgctcttcgtgctgctgtcgggcatgctcgcgttcgccggctaccggctgcaaaagggcgcgcggcgcacgaccgcgcgcggcgagccggtgatcgcgctgcagcgcgcgggcgcgaagagcagcacgccgtcgatcctgccgcgcgcgccgctattcacctgcgcgatcggcgtgcgcgtcgcgcccgatctcgtcgcccggctcgcgcccgccgcgctcgaccgcgcgttcgacgaggagcgcgcgaagctgcaggaggaacaggggctgccgtttcccggcatcacgctgtggacgagcgacgcgctgcccgcgtcgacgtgcgagatcctgatgcgcgacgtgccgcaggcgcggctcgagttgccggccgaccagacgatgctgcccgacgcggcgtcggacccggcgctcgccggccgctgcacgaagcgcgggcccgcgggcggcctcgccgagagctactggatcgacgacaaggcggtgccggccggcgcgcgcgcgtggcgcgccgagcaggtggtcgcgcacgagacgatcgcgctgctcaggcgcaacgcgcacctgttcctgggtattcaggaagcccaatggatactcgaccagctcggcgtcgattatccggggctcgtcgccgaagtgcagaaggcgctgccgacgcagcgcatcgccgacgtgctgcgccgcctgctcgaggagcacattccgatccgcaacgcgcgcgacatcatggagagcctcgtcgcatgggggccgaaggagaaggacatgctgatgctcgccgagtacgtgcgcggcgacctgtcgcgctatctcgcctatcgtgcggcgcgcggcgcgcggcagttgccggccgtgctgctcgacatggcggtcgagcagcacatccggcagtcgatcaagcagacgcccgcgggcaactttctcgcgctgccgcccgagcaggtgcgctatctcgtcgacagcgtcgcgtcgttcgtcggcgaagcgccgcgcgacgatgtcgcgctcgtcacgtcgatggacgtgcgccgctacacgcggcgcatgatcgaggcgcggctcgactggctgcccgtctattcgtatcaggagctcggcgaccaggtgcaattgcagccggtcggccgcgtgacgatgccgacggcggcccacgcatga

SEQ ID NO: 1130 - DNA, 2421 bp, Burkholderia pseudomallei
atgcatttctttcgattcgcgtggcggcacggccgatattggctttgcctgctgattgcgagcgtattgctgccgcaaggcgcggcggcggccgtcacggcgtcctacacggacatcgtcggcgcggacagcgggctgtgcgtctcgacggccggcaactcgagcgcatcgggcgcgggcgtcgtgcagacctcgtgcgcgggcctgagcaacacgacatggtcgttcgttcccgtcggcaaccgctatcacatcgtgctgcaaggcagcggcctgtgcctgaacgtgcccgggggctcgctgaacagcggcacgcaattgatccagtacgcatgtcagggcaacggccagaccaatgaccaatggacggtcgtcgcggtcggctcgagctaccggatcgtgtccgcgtcgagcggcatgtgcgtgaacgtgagcggcgcatcgcacgcgagcggcgcggcgctgatccagtatccgtgccagggcgcgggcgcgctcaacgatcaattcaatctgtatctgcccgtcgtcgcggccaccaacgtcacggcggcgaacagcaacctctgcgtgagcgtcaatggcggatcgacggccgccggcgcatcgatcgtccagggaacatgctcgaatcagggcgccacgggctggtcgctgctgcccgccggcagcggctatcacgtcgtctcgcaaggcaccgggcaatgcctgaacgtatatggcggatacacgacgagcggcgcgccgatcatccagtatccgtgccagggcgacgcgcagacgaacgatcaatggacgctcgtgcccgtcggctcgaagtaccggctgatttcggtgtcgagcggcatgtgcctgaacgtgagcggcggctcgctgtcgccgggcgcgccgctgatccagtacccgtgccagggcgcgaacgcgctcaacgaccagttctcgctcagcctgccgcagactttcccggtcacgctgccgtccgcatggagccccgtgattccgctgcccgtcaatccgatcggcatcgcgaacgcgccgaacggcaagctcgtgatgtggtccgctgatcagcaattgagcttccagaacgacgtcggcagcaaggcgacgcagacgcagaccgcggtgttcgacccggcgacgaacaccgcgacgcagtatctcgaaacctcggcgggctcggacatgttctgcaccggcaccgcgatgctgcccgacggccgcctgctcgtgaacggcggcgacagcagcccgaagacgacgctgtacgactggacgaccaatacgtggagcgccgcggcgacgatgaacattgcgcgcggctatcagggcgacacgctgctgtcgaacggctcggtgctcacgctcggcggctcgtggagcggcggtcagggcggcaagaccgccgaagtgtggacgaacggcggcgcgtggacgctgctgcccggcgtgcccgagacgaacatcgtcggccccgatccgcagggtatctatcgcggcgacaatcatctgtggctgttcgcgcaaggcaacggcacggttttccatgcggggccgagctcgcagatgaactggatctcgacggcgggcggcggctcgatccagtcggcgggcatgcgcggcgtcgatccgttcagcatcaacggcaccgcgtcgctgtacgacgtcggcaagatcctgaaggcgggcggcgcgaaatcgtaccagcagaacggcagcgtcacgacctatgcgtcgaactcggtgtaccagatcgacatcacgcgcgggccgaaccagccggcatcggtgcagcgcctgaacggcatgacgtaccagcgcgcgttcgccaacagcgtgatcctgccgaacggcagcatcgtgatgatcggcggccagagcgtgccgatgccgttcaccgacacgaccgcgatcatggtccccgaaatctgggacccggcgacgcaacgcttcaacctgctcaagccgatgcagacgccgcgcacctatcacagcacggcgatcctgatggcggacggccgcgtgttcgcgggcggcggcggccagtgcggcaccggctgcgcaatgaaccatctgaacgcggagatcctcacgccgccttacctgctcaacgcggacggcacgccggcgccgcggccggtgatcacgaacgcgccggccacggcgaagctcggcgcgacgatcgccgtgtcgacgcaaggccccgtcgcgtcgttcgtgctgatgcgcctgtcgtccgtcacgcatacgacgaacaacgatcagcggcgcattccgctcgcgatcgcgtcgtccggcggcacgagctaccagctcgcgattcccgccgatcccggcgtggtcctgcccggctactacatgctgttcgcgctcaacgcgcaaggcgtgccgagcgtgtcggcatcgatccggatctcatga

SEQ ID NO: 1131 - DNA, 999 bp, Burkholderia pseudomallei
atggcattcaagattctcagttgcgacggtggcggcatccggggattgatcactgcgttgctcattcaggatctcgatcgacgcagcgggatcctggcgaaggcggacggcttcgccggcacgtccacgggcggcctgatcgccctcgcgcttgcgcgcggggtgtcgatctcggaagtcgtcgacgtctaccggaaccgggggagcgagatattccaggagagcggcgcgtggctcgaacagcgggcgacgatcgcgacggatgcgagcttcgccgcgttcgccgggccggggcttttcgcgtgccagtatgtgaacaccgggctcaagcgcatcgcgcaggaactgctgcgcggcggcgatctgaccgagttgcaccggctgaccgtcatcaattcgtcacggctatgggatccggcgctgcgcagttggtccgcatgcacgttctcgaacgcgagcggcaatgcgtatcgccatgtcgcgctcgtcgacgcggcgctcgcgacgtcggccgcgccttcgtactttccgccgtacgaggtgccttcgctgggctatttcgcggacggcggcctgttcgcgaacaatccttcgatgacggccgtttccgaggcgcttgcgagccgtctcggcggcgagctcggcaatttgcgggtgttgtcgttcggcaccggcatcagtcaggcaggcatccgcccgagcgcgatcggcgatccgctcagatggggcgtgacgacatggttttggcctttcgagagccacgatgtgccggcatcggcgctgctcggtctcacgctcgatacgaccgcgatgctcgcgacgcagcaggcgacgcaattgctcggtggaggctaccggcgcgcgaatttcgtgctcggcgaaacggttgggcttgacgactggcgcaaggcgtcgctgctggagagcgaaacggccgcctacatgaagacgcccgcttgggagggcgtgtgccagtgggtcgatgcgaactggcgctga

SEQ ID NO: 1132 - DNA, 1155 bp, Burkholderia pseudomallei
atgaagaaactcgctctgtctaccctctcgctcgcgctgctgggcgcagccggtgcagctcaggctcaaagcagcgtcacgctgtacggcgtgattgatacgtcgatcacttatgtccacggcaacgacggcaaggccaacaacgcctggctgatgggcagcggcaacctgcaaggcagccgctggggcctgaagggcaccgaggatctcggcgccggcctgaaggcgatcttccagttggaaaatggcttcaactcgaacgacggcacgctcggccaaggcaagcgcatgttcggccgccaggcgttcgtcggtctgcagcatgaccagtacggcacgctgacgctcggccgtcagtacgatccgctcgtcgacctcgtgcaaccggtgacggccgacaactacttcggcagcctgttcgccaccccgggtgacgtcgacaacaacgacaacagcctgcgcgtgaacaacacggtcaagtacacgtcgcccgtgttcgccggcttccagttcgaagccctgtacggcttcagcggcatcgcgggctcgccgggccaaggccagacgtggtcggccgccgccgcatacaacaacggcccgatcggcgtcgcggccggctacttctacacgtcgaacccgtcgccgacggccggctcgcgctcgacgtggagcggctcgtccgacgcgatcttcgacggcgcgatcaacagcggctacacgagcgcgaagtcgatcggcatcgcacaggtggccggccagtacgtgttcggcccggtcacggtcggcctcggctacagcaacgcgcaatacaagccggacggcttctcgggcttctcgtcgaccgagaagtacaacacgggccgcggcttcgtgacgtaccaggccacgccggcgctgctgctcggcctcggctacgcatacacgaaggcgagcggcgacacggacgcgaagtaccaccaagtgtcgatcggcgcggactacgcgctgtccaagcgcacggacgtctacctcgccggtgcgtaccagcacgcgagcggcacgcagcgcgtcgatgcgacgacgacgcaaacggcgcaggcatcgatcggctcgtacggcgtgaacggtacgaagtcgcaagagatggtggctctgggcctgcgccacaagttctaa

SEQ ID NO: 1133 - DNA, 2727 bp, Burkholderia pseudomallei
gtgaacaggaacgtgtttcgtttggtgctgaacagggtggcgggcatgccggtgccgatgccggcggcggaggtgtcgcgcgggcgcggcaagctcggctgcggcggcgtgcgggcgcaacgtcgcggcggtgcggcgtgtgcggcgctgcttggggtggccgggccgtccttggcgttcgcggcggtggtggcggacccgaacgggggcgcgcagcggcccggcatggcgacgacggcgaacgggacggacttggtcaatatcgtcgcgccggacgcgacggggttgtcgcacaacaagttcaacgagttcagcccggttggacgcggcgtggtgttgaacaacagcgtgcggcccggggaatcgcagatcggcggcatggcggcgcagaacccgaacttgatgcaaccggccacccgggcattgctcgaggtgacgcagcaacgcagcgtgctgcagggcacgctggaggcgttcggcggcaagctcgacgtgctggtggcgaaccagcatggagtgacgatcaacggcttgacgacgctgaacgtgggccggctcggcgtgacgacggggcaggtgctgccgcaagcggccgggcagttgcgtttgggcgtgacgcaaggcgacgtgctgatcgaccatgggggcatcgatacccagggcctggacatgttcgacgtggtgagccgcagcatcgccgtgcgcgggccgatccacgattcgagccgcgccgcgggcgccgacgtgcgcctcgtggcgggcgcgacggcctacgatccgcagaccggtcattatgaggcgatcgcggcggacgaatcgaaggcgccggtgcaggagggaatcagcggcgaactgctgggagcgatgcacggccgtcacattgtgctggtgagcacggaatcgggcgtgggcgtgcggcacgacggaccgatcaagtcggcgaacgacattcgggtgagcgcgaacggcgaggtgacgctgggcgggccgcagcaggcggctcaggaggcggttgcaggagcgcaggcggtaggcggcgccggcatgcagaacgtgatcgcgggcggcacggtgagcgtctgcgcgcgtgggcacgtcgcgatccagggcgcggtgaccgcgggacaggatgtggatctgcaggggaaaagcgtgaaggccggccggatgagcgcgcagcgcgacgcgctggtgacggcggcggatggcgtgacgctcgatggtccggtggacgcgaagcgtcacgtgtggatcggagcccacggtgatgtggtgatccgtgaagcggcggcggagcagaacgtggtgctgctggggcgcagcgtaacggccggccggttggacgcgcagcgcgacgtattggcggcggcccgcgacggcgtgacgatccatgaagcggcggccgcggggcaggatgtggtgctgcagggaagcagcgcgagggtcggccagacgagcgcgcagcgcgatgtgctggtgatggcggcagatggcgtgacgctcgatgggccggtgagcgcgcagcgcgccgtatgggtcgagacccaaggtgacgtggcgggcagtgagtggatcaaggccggacgggacgtgcaaatcggcgcggcggcggatctggcgggcgcggtaacggccgaagagatgcagcaactcaaggcccatggtgacgcggcgaacaggcggcgcgtcaaagccgggcggaacgagccagccggcacggcggctgaacgtccggccgcggcggagcagacggtggccgtcgctgacgcgatgcgcgagatcggcgtaggcggcgatcggctgtccggattggatgccgcgccgggtacgccgggtacgcccttcggcgcacacccgcaagcgatgttcgacgatccggcggcgcagattgcgcgatcggctcgatccacggcaacggcgggcggacatgcgggttcgttcatgcgcgtcggagacggtcacatcgccaaaatgaccacgtccagagaggcggagatatacgagaattaccgcttggctcttgccggcgtcatccccgacaccgtgccgcctgaagaggtggattcgcgggtcggtgtcacggccaggcagaggcaggccatggcgactttcaaagggtgggcggagatgaaaggccagcgggttgtcgtcatgcaggcgctgggcgcggagatcgcgccggaggacaagatcgagctggacgtcaagatcggcgccagtacggtgtcgcgcaccgagttgatcggcgccggcaggactcgctggcaggccttgagcaagaaggtgagattgacggcggcggacctgctgcggggctcgcgttcgctggtgggcgacgatcgcggctatacgctcgccggccgcacgagcggggggattgccctggacgcgaggaattcacgcaactccgtcggccgatccagcgaatcgctgattcgcgaggcgctggatcgctcgcccgatacgcgctggcggaacgcgcagcacttgctcgggcagttgcagaccattcgagagaagatgcacgcgttgccgctcaccttcgtcgcctccagcgtcctcattgcaatcgacaaacggaaaccggaaaactcggtcgcccggctgatcgatctcgcgcacccggtgcagcctttcgaaaacgaagcggactatgagaaagtcaatcaccgcttcgaggatggtcttgacaagctgatcagactcttccagcaggtggaaaaatag

SEQ ID NO: 1134 - DNA, 396 bp, Burkholderia pseudomallei
atgcccaaccgattccgcaaactgactgcctggctgggcatgcttgcgatcgcgttggcgatcgtcgcgccgctcgtctcgcaggcgagtgcgcggtccgccgcgccgtcttccggcgcggtgatctgcggggacgagcaccgcgcgcagccggccgaggcgggcatcgcgcacgacggccccgtgcacgacggcgtcgcgcatcacgcgttgcatctcgacgcgtgcggctactgcgcgttcttcgcgcacagcccggcgatcggcgcggccgcgccgtcgctctttgccattcatgtcgcggccgtcgcgccgcccattccctccggggccgccgcgccctcgctcgagcgccacacgcacgcttatccgcgcgcgccgccgacagacgcctga

SEQ ID NO: 1135 - DNA, 399 bp, Burkholderia pseudomallei
atgaagccgctccttttcgccgccgccctgacggcactcgccctcgtcggccccgcccgcgccgccgacgccgcacaagcggccgccgacgcaaaggcccaggccgcggccaacgaggcggccgggctgcccgatctcacgaagatcaaccgccccggcgccgaagtgacttcgaaggtcgatttcaacgacgtgcggcgcacgccgagctttcacgaaaaaagcaagaacggcaccgaagtcaccgaattccgggatcgcggcaagccggtcgagatcaacgtgaaatcgaacttcggcacccgctatcagatgagcgcgtcgcccgatacgtcgccgcgcccgcacgacgccggcgtgcctgtcacgcgcctgccgtcggtcaacctgcactattga

SEQ ID NO: 1136 - DNA, 1875 bp, Burkholderia pseudomallei
atgcgcactccgacgcccctgttcgccgcactgtcgctcctgtccaccgtcgccgccgcgcccgcgttcgcggccgccgcatcgcccgtcagcacgaactgcggcggcagcgcaacgccgatcgccgagattcagggcgccggcgcgccttcgccgctcgccggccagaacgtatcgatcgaggccgtcgtcacggccgatttcggcggcgccgacggcttcggcggcttcttcgtccagcaggccgatccgcagcgccgcaaccagcccggcgtatccgaagggctgttcgtctactcgccgaaagcccgcgcgcgcgcgggcgagctcgtgcacgtgacgggcaaggtcgaggagaaatacgggcagacgcagctcacgctgtcgggcgccgtcgcggtctgcgcgagcggccagtcggtcacgccggcgacgctcgcgctgcccgtcgacagcccgaacgcgttcgccgcgtacgaaggcatgctcgtgcgcctgccgcaaacgctgaccgtcaccgaggtctatgaactcggccgctacggtagcgtgctgctcagcaacgggcgtctgcgcacgccgacgagcgtcgtgccgcccgcgcaggcgaaggcggtggccgaggcgaatgcgcgcaaccggctgatcctcgacgacggctcgaacaagcagaatccggcgaccgtcccgtatccggcgccggcgctctccgccgcgaacacgctgcgcgcgggctacacggccgccgatgtcgagggcgtgctcgagctgcgctacggcgcatggcgcctgcaaccggtgccgggcgcgcgtacgcccactttcggcgcgagcgcgaacccgcgcaccgccgcgcccgcgcgcgatcctcgcgcgaacctgcgggtcgcttcgttcaacgtactgaactacttcaacggcgacggcgcgggcggcggcttcgacgatccgagcaaccggggcgcgaagaactacgaagagttcgtccggcaggacgcgaagatcgtcagcgcgctgaaggcgctcgacgccgacgtgatcggcctgatggaaatcgagaacgacggctacggcccgctgagcgcggtgcgccagctcgcggcgaagctcggcgagaactggcgggtggtggacccgggcagcgcgcggctcggcggcgatgcgatcgcggtcgcgctgatctacgacagccgcaaagtgaagccgatcggcaacgcggcgacgctcgcgatcgacgacaagaaccgtcagccgctcgcgcagacattccggccgctcggcggctcgcgtgcggtgacggtcgccgtcaatcatctgaaatcgaagaactgcccggatgcgacgggcgatgacctcgatcagggagacggccagggctgctggaatgcgacgcgctcgcgcgcggcggcgaagattgccgattggctcgcgcgcaatccgacgggcgcgcccagcgaaggcgtgctgctgatcggcgacctcaacagctacacgtacgaggatccggttcgcacgctcgaatcgcgcggctacgtgaatctcgtgtcgagcaaggtcggctccggcgcatacagctacgtctacaacggcgaggcgggctacctcgaccacgcgctcgcgacgaacgcgctcgcctggcgcgtgaaggcggtgcacgactggcacatcaacgcggacgagccgatcgccctgcaatacacgctcgcatacaagagcgccgaacagcagcgcacgtattacgcgcccgacgcgtatcgctcgtccgatcacgatccggtactgatcgacatcgcgctcgccgacgaatatgcggccgcggcgtcgcgccgaggcgcggagatggcggccgcgcacagccgtcgcccgtggcattga

SEQ ID NO: 1137 - DNA, 2097 bp, Burkholderia pseudomallei
atggatgaccaccgacgtatcgcgccgcctttcgctcgcaggctgcatcccttgtcgctgctgctcgccgcgagcctcgcgcatggcgagacgggcgcgccgcccgccgagcgccgatcggacgcgccgcccgcgacggcgctcgcgccgatcttcgtgaccgcgaacccgctcggcgcgtcggcgctgagctcgcccaccgcgtcgctgtccggcgacgcgctgacgctgcgccgcaccgattcgctcggcgacacgctgaacggcctgcccggcgtgtccacgacgacctatggcccgctcgtcggccgtccgatcatccgcgggatggacggcgatcgcatccgcctcctgcagaacggcgtcgccgcgtacgacgcgtcgtcgctgtcctacgatcacgcggtgccgcaggatccgctgagcgtcgagcgcatcgagatcgtgcgcgggccggcggcgttgctgtacggcggcaacgcggtcggcggcgtcgtcaacacgatcgacaaccggattccgcgcgaagcgatcacgggcgtctcgggcgcgctcgacgcgagctacggcggcgcgaacaatgcgcgtgcgggcgcggcgctcgtcgaaggcggcaacggccgcttcgcgtttcatctcgacgcgttcggccgcgagaccgacgcgctgcggattccgggccatgcgcattcggcgcgccagcgcgcgctcgacggcgaggacgccagcgagccgtacggcaagctgccgaacagcgacggccgccgttacggcggcgcggcgggcggctcgtacacgtgggcggacggctacgtcggcgcatcgtacagcggctacgaatcgaactacggctccgtcgccgaaaccgacgcgcggcttcagatgcggcaggagcgcgtcgcgctcgcgtcggaggtgcgcaatctgcgcgggccgttctcgcagctgaaattcgacttcggctacacgaattaccagcataaggaaatcgaggacggcgtgacgggcacgacgtttcgcaatcacggctacgaggcgcgcgtcgaggcgcggcaccgcaagctcggcccgttcgaaggcgcgctcggcgtgcaggtcggacagaacacgttctccgcgctcggcggcgaggcgctcgcgcctaccacgcgcacgacgagcgtcgcgctgttcggcctcgagcagtggcaggcgaccgacgcgctgaagctgtccgccggcgcgcgcatcgagcacgtgcggctcgatccgagcgcgaacggcgacgacaagttcggcttcgcgcgctcgcgcgatttcaatgcgggcagcgtgtcggcgggcgcgctgtatcagctcgcgcccgcgtggtcgctcgcgggcaacgtgtcgtacacggagcgcgcgccgaccttctacgagctgtacgcgaacggcccgcacggcgcgacggggcagtacctgatcggccggcccgatgcgcagaaggagaaggcggtgtcgaccgatctcgcgctgcgctatgcgagcggtccgaaccgcggcagcatcggcgtgttctacagccgcctgcggaactacctcgccgaatacgacaccggacggctcgtcgacgacgacggcgtgcccgtggccccgggcgccgacgacgcgctgcgcgaggccgtctatcgcggcgtgcgcgcggagttctacggcgtcgagctcgaaggcaggtggcgcgcgttcgagcggcgcgggcatcgcgtcgatctcgagctgagcgccgactacacgcacgcgcgcaacgcggacacgggcgagccgctgccgcggatcgcgccgctgcgcgcgacgctcgcggccgattacggctacggcccgttcggtgcgcgcgcgcagctcacgcatgcgtgggcgcagcatcgcgtgcccgagcacgatctcgcgaccgacggctacacgtcgctcggcgtcgtgctcacctacaagttgcgcgtcggcgcgacgaactggctcgcctatctgcgcggcgacaacctgacgaaccaggacatccgctacgcgagctcggtggtgcgcaacatcgcgccgcagggcgggcgcagcgtgagcatcgggatgcgcacgacattctga

SEQ ID NO: 1138 - DNA, 2865 bp, Burkholderia pseudomallei
gtgtatagacgtttcctgctcgttgggatgacggcgctcgcgctcgcggcgtgcaacagcgattccgtcgatacgcccgcgctcggcgacacccgcacgacgctgcttgcgacgggccagttgatttcgcccgcggccgcacccggtgccgcgttcgtgccgctgaatccggggcttgcggatgcgccgggttacatcgcgggccaaccggtttcggaggcgctcagccccgaccgcaagacgctcctcgtgctgacgagcggctacaacaacgtgctcgacgcgaacggcaagatgatcaagccggattcgaacgaatacgtgttcgtgttcgacgtgtccggcggcgcgcccgtgcgcaagcaggtgctgcaggtgagcgatacctacgtcggcatcgcgttcgcgccggacggtcagcatttctacgtgacgggcggcggcgacgacaacctgcatcgcttcgcgttctcgcagggcgcgtggggcgaggtgggcgcgccgatcgcgctgaatcacaaggcgggcaacggcatcggcagcacgccgcttgcgacgggcgtcgacgtgacggcggacggcaagcgcgcggtcgtcgcgaatcgctacaacgattcgatcacgctcgtcgatctcggcgcgggcgcggtgctcgccgagcgcgatctgcggccgggcaagagcggcggcgcatcgggcgcgccgggcggcgagtatccgaacgcggtgcgcatcgtcggcaacaagacggcttatgtgtcgagcgagcgtgatcgcgagatcgtcgtcgtcgatctgtcgacgaacgcgccgcaggtcgtcacgcgcattcccgtcaagggcaatccgaacaagatggtgctgaatgccgcgcagtcgcgcctgtacgtggcgtccgacaacgcggacctcgtgtcggtgatcgatacggccgcgaacaaggtggtgtccaccgtgtcgacggtcgcgccggcgggcctcgtcaccgagatgcagtatcgcggcgcgtcgccgaacgggctcgcgctatcggccgacgagcgcacgctgtacgtgacgaaccgcggcacgaacgacgtggcggtgatttcgcttgccggcgcgtcgcccgccgtcaccggcctgattccgaccggctggtatccgtccgacgtcgcgctcggcgcgacgaacgcgatgtacgtcgtctacacgaagaacatgccggggccgaatccgggcaactgcaaggacagcggtcgcacggtgccgtgcccggtgaagaacacgccggtgaagctcgtcgagaatcagtacatcgaacaactgagcaagggcggcctgatgtggatgccggcgcccggcagcaagacgctcgacctgttgacgacccaggtggcgaacaacaacagcttcaacgcggcgctcacgccgaacgacatcgcgacgatggccgcgctgcgcaagaagatcaagcacgtgatctatatcgtcaaggagaaccgcacgtacgaccagattctcggcgacatcggccgcggcaacagcgatccgtcgctcgcggagtttcccgacgcgacgacgccgagcatgcacgcgctcgcgaagacgttcgtcacgctcgacaacttctacgattccggcgacgtgagcggcgacggctggccgtggagcacgggcgcgcgcgaatcggacgcgggcgcgaagatgctgcccgtcaactacgcgaacagccccgcgcgcgccggcgcgcgcggcggctcgtacgactgggaaggcgcgaaccgcaacgtcaacgtgggcctgacgggcgcgcaacgcgcggccgcgaatccgtcgctgccgtccgatccggacctgctacccggcaacgccgacgtgtcggctcccgacggcccgtccgacgcggttcagcagggctacatctggaacgccgcgctgcgcgcggggctgacggtgcgcaactacggcttcttcgcggatctcgcgcgctacagcggccctggcgcgatcgcgccggatcgcacgccgttcgtcgatcacgcggtgcaaacctatgcgacgagccccgcgctcgtcgatcgcaccgatccgtatttccgcggctatgacaacgcatatccggatttctatcgcgaactcgagtgggagcgcgagttcaacggcttcgtcgcgaacggccagatgccgtcgctcacgctgctgcgcctgccgcacgatcatacgggttcctattcgagcgcgctcgacggcgtcaacacgccggagatccagatggccgacaacgactacgcggtcggccgcgtcgcgcaggccgtcgcgaacagcccgtatgcggccgatacgctgatcttcgtcgtcgaggacgacgcgcaggacgggcccgatcacgtcgatgcgcatcgcagcacggcgttcgtgatcgggccttacgtgaagcagaacgcggtcgtcagcacgcactacacgacggtcaacatgatccgcacgatcaccgaagtgctcggcctcgatcacttggggctgttcgacgcgacgcaaggcccgatgaccgacgtattcgatctgaaccagtcgaagtggagcttcaaggcagtggcgtccggcttgctcgcgaacacgcaactgccggttccgtcgggcgacatcaagacggcggcgttcaagccgacgcacgggatgcgctactgggcgctcgcgacgcgcggcatggatttctcggtcgaggatcggctcgatgcggttgcgtacaacaagctgctgtggaaggggttgatgagcgggcgcgcgtacccggtgcgcgtcggcgagcgtgcggcgccgcatcgtcgcgacgacgatgacgacgtgaaggtgtcgcaggcgaggagcgcggcgcacggatga

SEQ ID NO: 1139 - DNA, 1257 bp, Burkholderia pseudomallei
atgcatgcgtttcgttgccgacgcggcccgcccgttcctctcgccatcgtggcgctcgcgtgcgcgtgcgtattcggcgcgccgcgcgcgagggcggctgccgctcatgccgacgcgccggttgccgcgtcgatcgcgtcgttcgagcccgccggcgggccggccgctgcggcggacgccgccgatacggccgtgatgcccgcgccgcctgcgtcgttcgcgccgcctgctgcgccgcccgtgccgcaggttgcgtcgcttgcttcgtctgcatcgactgtgccgacaaccccgacagcgacgacagcaccgatcgcgtccgcaccggccgccacgcccctttccgcgccgccgctcgcaccgccggccgccgcaccgccggccgccgcaccgctcgtcatcgttccgcgccgcttcgacgacacggcgctcgtgaaggtcgactcggaaggcatgcccgacggctggtcgctcgccgaggtcgcgccgaaccaggaaaaccagccggcgctgccggaggcgctcgtcgcgcacgtgcaggcgccggcgcagcggcacaccgagctctcgctcgcgtattcgatggcgcacctgacgaacggctatggcgactggtacggcgtgcacctgcgcgggctctatcaggcgggcggccgcacgatcatcggcgagctcgcgcaactgcaccgcttcaacgaaagcacgcagctcggcgcgatcacgtacatccaggacatggggccggactggttcggcggcatcgggttttccggcacgacgtccggcacgatcctgccgagcgcgcgcgtcgatctgtcgctcaaccgcaagctgctgtcgaatcgctcgctcgtgctgtcggcgggcgcgggctacgcgtggaaccgcaacggccaccgcgatcagctctaccacctcggcgcgatctggtatgcggtgccgaagtggatcttcgaggcgggctggaactacacggtcgattcgccgggctcggtgaaggcgcccgcctactacggcgcgatcacctacggcgaggtcggcaagagcctgatcgtgctgcgtggcagcttcggccgcgaggcgtatcaggcgaccggaaacaacgcgcagatcaccgatttccgcagccacgaggtgtcgctgaagtggcgctactgggtcacccgcaagtggggcacgcaagtcgagttcgattactaccacaacccgtactatttgcgcatcggcggcgaagtcgggatgttctaccggtggtga

SEQ ID NO: 1140 - DNA, 420 bp, Burkholderia pseudomallei
atgcaagagaacctggacgcggactacttcaaccggttcggcgccgactatctgccgggcctgctcggcgtcgtcgtcaagcaggtcgagaaaaaccacgtgctcgccgagctgacgatccgccaggccgtgctcgcgcacggcattctgcatgcgggcacgatcgtgagcctcgccgataccgcgtgcggctacggatgcctcgcgagcctgccggagggcgcgtccagtttcagcacgctcgagctgaagagcaatttcatgggcaccgcacgcgacggcgtgatcgtctgcgacgcgcgcgcgatccacagcggccgcacgacgcaggtctgggacgcgaccgtccggcatcgcgagacggacaagctgctcgcgacgttccgctgcacgcagatgatcctctggccgacgaagtaa

SEQ ID NO: 1141 - DNA, 1770 bp, Burkholderia pseudomallei
gtggcatcaatcatgactattaagcggttgccgatcgcgccattgtcagctttggttatgttctctgcgcaggcacaacagatccccactccgaacgaccaagccgccgccgcccgtgccaatgccgagcagaatcagcaggcgcaacagcgccgtgacgcccagcagcgcgacgccaccgtgcaagcgccgggcgtgcgctcggacgtgccgcgcccggaagcctatccggtactgccgaccgaaacaccgtgctttcaaatcgaccgcttcgcactcgacgtgcccgactcgttaccggccgcgtcgaaggcgcaaggcgcgtcagccttgccgatggatcgcttcgcctttgcacgcgactggcttgcgcactacgccggccaatgcatcggtaagcaaggcgtcgacctgatcgttaaggggctgtcgcaagccatcctcgctcgcggctacatcacgacccgcgtactcgtgcccgagcaggatttgtccactggcgcgttgaagcttgccctgattccgggcgtgatccgccacgtgcgtttcgaggacgagaagttgctcggaacgtggaagaccgctttcccgacgcgcgacggcgacgtgttgaacctgcgtgacattgagcaagggcttgagcagatgaagcgcgtgtcaagccaggatgtgtccatgcggatcgcaccgggtgacatgcccggcgaaagcgatgtcgtgctcgacgtgaagcgcggcaagccgtggacggtcgtcgcgtcgatcgacaattccggcacgcgcgcgaccggcaaactgcagggcaacgtatcgcttggcatcgacaacccgctgggcctgaacgacattttcaacgtcggcttcaaccaggatctggaattcggcgataagcgcttcggttcgcacggctggaacgcgttctattcgattccctggggctactggaccggcacgctttcggcgtataccagcacgtactttcaaccgctcgcggccgtgaatcagacgtttgttgccagtggcaacatgaagacggtcgacttcaggctcaatcgtgtgctgacgcgcagccggaacgatgtgttgggcgcgcaggttcgcttgacgcggcgcttcggcgacagctacatcgaaggcacgacgataccgtcgtcgcaccagaacgcgacctttctcgaattcgggttgaacgaccggcactatttcggctcgtcgcagttcgatggctcgcttgcctatcgtcaggggctcggctggctcggctcgaccgacagcatgttcgcggcagagggagggcagacgtaccgattcaagatggtcgtgctcgatgcgaacctatcgacgccgttcgtcatcggcacgcagccgttcaaatacgtgacgacctttcatggtcagtacaccggcaacacggtttcatatctcgatagcgtgacgatcggcagccgttataccgtgcggggattcgacggtgaaacgctgctggcgggatcgcgcgggttttactggcgcaacgaattgcaggtccccgtcgcgcagaccgggctatcggcctatgccggtctcgactacggtcgggtctggggaccggagccggtcgcgctggtcggcacgcagctcgcgggcgcagtgattggcgtcaagggcagcttgatgacgcgcttcggcgggtatggctacgacctgttcgctggcacacccgtctacaaaccgtccgggtttcccaccgcgcgcgtgacggtgggctttcagctcacggcgcaattctga

SEQ ID NO: 1142 - DNA, 9312 bp, Burkholderia pseudomallei
atgaacaagaatcgctatcgggttgtcttcaatcgcgcgcgcggcgcactcatggtggtgcaagagaatggccgtgcgtcccacggtagcggcagccgcgacgcgagcgcgggcgtcgtccctgcttggctgtcgctctcgccgtttgcgttgcgccatgttgcactcgcggtactggttgcggccggcgtggtgccgatatgggtcaatgcccaggttgtcgcaggcggcgcacacgccccgtccgtgatccagacacagaatggacttcaacaggtgaacatcaaccgccccggcgcgtcgggcgtgtcgatgaacacgtacaaccagttcgacgtacccaaacccgggattattctcaacaactccccgattaacgtccagactcaactgggcggcattatcggcggcaacccgaatttccaggccggcgacgcggcacgtctgatcgtcaaccaggtcaacagcaacaatccgagttttatccgcggcaaagtcgaaatcgggggcgcggccgcccagctcgtgatcgcgaatcaggctggcttggtcgtggatggtggcggcttcctcaatacgagccgagccacgctgacaaccggcaatccgaacttcgggcccgacggctcgctcacgggtttcaacgtcaaccaaggcctgatttcggtggtcggcgcggggctcgatacggccaatgtcgatcaggtggatttgttggcccgcgccgtacaaattaacgctaaggcttacgcgaagaccctgaacgtggtggctggatcgaaccaagtcgactacaacacgctgaacgccacgccgatcgccgccaacggtcccgcgcccaccatcgcgatcgatgtgagccagcttggcggaatgtatgcgaatagggtctttctcgtctcgtcagagaatggcgttggtgttgccaatgccggcgacatcgccgcgcaagccggcgacctgacgctgcaagcgaacggccgcctcgtcctgtcgggccacaccaatgcggccggcaatatgtcgctgtcagcctcgggtggcattcagaacagcggcgtcacgtatggcaagcaatcggtcacgatcaccacgggcacggacctgaccaacagcggcgcgctgaccgcccaacaaaacctgaccgctaacgtcggcagcctcaactcgacgggcacgctcggcgcaggcatcaacgtcgacagcacggtcagcacgagcggcgatctgaacgtcacgagcagcggccagttgaccgcgacggggaccaacagcgcggctggcaacgcgaccttcaccggtagcggcatcaatctgtcgaacagcgcaacggccgccaacggcaacctcgcgctgagcgcgacggcgggcgatgtgaatctggccggctcgactgtcagcgccaagggcgccgtgaacgcgcaggcgagcggcacggtcatcaacgaccggggcaatctgtccagcggcgcgggcatgacgcttggcggcggcagcctgtcgaaccagggcggccgtgccaattcgcaaggcccgctgtcggtgcagatggccggcaccgtgtcgaaccaaaacggcatgctgagttcccaaagcacggccgacgttcgcgggagtgcgatccagaacaatgccgggctgattcagagcgcaggcaagcaaacgattgctggcgcatcgatcgacaattcggcaggccggctgatttccctgaacgcagacggcctgtcggtgacggcaaccggcgcactcacgaacgcggccggcgcgaacgtgagtggcgatccgggcggcgtcatcggcggcaagggcgacgtgaccgtacaggggaacacggtcacgaacagcggctcgatgtcggccgacgcgaacctgcacgtgatcggccagagcgtcgacaacggtaatggcgcgctgcacgccggacagactaccaccgtcgacgccggcaatcatctttcgaatgccggcggccgggttgagggtcaaagcgccgtgttgaacggcgcgacgctggacaactcccagggcacggtcaatgcggcgacggtctcgctgaacggcacgacgttgctgaaccacggcgggacggtcacgcagaccggcaccggcccgatgacggtcgcgattaccgacaccctcgacaactcgaacaacggcctgatccagacgcgcagcacggatctgtcgctcacgtccactaccctgatcaacgacaacggcggcacgatcacgcacgttggcccgggcacgctgatggttggcaacggttcgggcacggtcagcaacaaagcgggcgccatcgccagcaacggccgaaccgtcctgcaaggcaagacgatcgacaactcggccggttcggcgtccggccaaacgggcctgagcgtcaacgccgccgactcgattacgaatctgggcggcaagctcacctcgaacgccaacgtcgacgtgaccgcaggtggagcactggtcaacgacggcggtgaactcggctcaaagacggcagcgacgacgattcatagcgcctcgctctcgaatctgaacggcaagatcgtctcccccactttgacggcaaccgttgctggcttgctcgacaacagccagaacggcgacttcgaagccaatcagcttgcgttgacggccgcgaacctgaaaaaccagggcggccacatctcgcaatggcagagcggcccgaccacactcgccgtctctggcacgctcgacaattcgaacggcggcgtcatccagacgaacagcacggacctgacgctcgcgccggccgttctggacaactcgaaaggcaccatcacgcacggtgggaccggcacgctgacgctcacgcccggcaacggcgcgggagccttgcaaaatactggcggcacgatcggcaccaacggacaggccatcgtgaaggccggcagtctggacaatggtagtggggtcatcgccgccaaactgggtctgtcggccacgatcgccggggcgatgaacaatactcagggtctgatgcgctcgaacgcggcgctgtcgatcatcggcaacggggcactgtcgaaccaccaagggcacatcgaggcgggcacgcccggcgacacgagcacgctgtcgattcaggccgcttcgatcgacaacaccgatggcgcggtgcacgacttcggcacgggcaagatgaccgtgcaaggcggcagtcagatcgtgaacagccacgcgggcggcgtcgacggcatggggcagatgaccggccagggcgacgtgacaatcggtgcggcctcgatctcgaacacgcagggcggccagttgatgggcgcgaacctgctgattcaaggcgctacgctggacaactccggaggacaggtcggcaacgtcgcgaacgccacgggcgacgtgaacgtcgcgatgtcgggcgcggtgacgaataccaacgggtcgatcacctcgacgcgcgacctgtcggtagcggcttccacgctgctcggcggcggcgcatacagcgcggcgcgtgacgcggcgattaatctgcaaggcgacttcacgacgacgccgcaaacgcagttcaacattggtcgcgacctgacgtttaccttgccgggcacgttcgccaacagcgcgaacctgcaatcggtccataacctgacggtcaacgccggcaacatcgtcaacacgggcgcgatgacggcaggcagcctgctcagtacgcattcgggcgacctgacgaactatggcgcgatggtcggcggcagcgtcgccatccaggcgagcggcacggtgtcgaacctcggcccggtcgcgctgatcggcgcatcggacacgtcgggcctgctggaaatcgtcgcgcacgacatcgagaaccgcgacgacacgacgttgggcgattcgatgccgaccacgacgatcttcgggcttggcaaagtggctttggcgggcggcaaggacgcgaacggcaactatacgaacgcagcgctgatcaacaattcgtcggcggcgatccaatcgggcgcttcgatggaactgcacgccgacaaggtcacgaacacgcggcgcgtgatgcagacctcgggcaacacgagtcaggtcgatccggcattgctgcaacagctcggcatcagcatgtccgggtgcgccgcctactacattgcggcctgtagtggtcaggacgtgcactggatcaacctgttccacgatccgaactaccccgattacgatcccgcgccgatcattgccgcgctcaaattgcagccgggcggggtctttaccgttccaccgaacggtggccaatggaacagcgggtatcaatacacgacctatgagggcaaggcgaccgccaacaccgtgacgaagctgagcccgggcgcgcagatcgcatcgggcggcgatctcgacgcgtcgacggtcaagacattccagaactactggagcagtgtgacggcggccggcaacatcaagcagcccgcgagcctcgacatggacggctggggcgcgacgggtcagcaggcgccgggcgtgacggtcgtgtattccggctactaccactacaacaactacgacaactcggaacacaactggaccttgccgttcggcgacaagccgttcgtcggcggaccaggcggctatacgcaggccgcgccggccgatgtgcggcaatacagcttgcccgactatcgctcgacgtggggcgcgaacggcacgatctcgggcaacggcgtgagcgtgaacaacacggcggccaatgcgaccattccgtcgctcggcctgctgcccggccaggccgtgccggggctgacgatcggcacggtcagcggcaacgcgagcggtacgcagtcgggagccgccgcgatcaagggcggcacgcccacctgggtcgatccggtgatcgcgagcgcgacggccgtgaacgtgttgagcaacctgacgattccgcaaggcggcctgtaccgaccgaactcggcaccgaacccgacgtacctgatcgagacgaaccccgcgttcacgcggatgaacaatttcctgtcgagcgactattacctgaaccagatcggcgtcaacccgctgacgacagaaaagcgcctcggtgacgggttctacgagcagcagctcgtgcgcaaccaggtcacgcaactgacgggcaaggcggtattggggccgtatacggacctccagggcatgtatcagtcgctgatgctcgcgggcgccgaattgtcgaagtcgctgaacctgccgctcggcatgagcctgtcggcgcagcaggtggccgcgctcacgaccaacgtgatcatcatgcagaccgagacggtcggcggccagcaggtattggtgccggtcgtgtatctggcgaaggccgatcagcagaacgcgaacgggccgctgatcacggctggcaatatcgatttgaagaacacgcaggtcttcacgaacagcgggaccgtgaaggcggacacgacgcttgcgcttcagggcaagcagatcgacaacgcgttcggtgcgctgcaaagcggcggcttgacgtcgctcgacacgacaggcaacgtggatctcacctcggccaatgtgaaggccggtagcctcgacctgaacgcgggcaacaagctgattctggatacggcgacgcagacgacgcaccaggtcagccgcgacggcgcgacgagcgacaagacgacgctcgggccggctgcaaacctgaacgtggctggcgacgcgtcgatcaagaccggcggcgacttccagcagaacgcgggcaacctgagcgtcggcgggaacctgaacgccaatatcggcgggaactggaatctaggcgtgcagcagaccggcgaacacaaggtcgtgcagcgtgcgaacggcgtgtcggatacggacctcaacagcgcgaccggcagcaccgtgaacgtcggcggcaagtcggccatcggtgtgggcggtgacttgacggcgcaaggtgcgcggctcgacttcggccaaggcggcacggtcgcggccaagggcaacgtgaccttcggtgcggcgagcaccacgtcgaccatcaacgccaacagctcgggcgaccaggggaatcgcagctatgcggaaacccggcatggagcggaccaggcgctgacaggcacgaccgtcaagggcggcgatacgctgaatgtggtgtcgggcaaggacatcaatgtcatcggcagcacgatcgacctgaagaaaggcgatgcgaacctgctggcggccggcgacgtgaacgtcggggccgcgaccgaaacgcacgtgtacaactcgcgcgagacgcatagccgcagtggcgtcgtgagcggcacgaagatcgccagcagtcaggacgcgaccagcaccgtcgcgaacggcagcctgatttcggcggacggcgtgtcgatcggcagcggcaaggacatcaatgttcaaggtagtacggtcgtcggtacgcacgatgtggcgctgaatgcggcgcacgacgtgaacataacgacgtcgcaggacaccagccaatcgtcgaccacctatcaggaacagcactcgggtttgatgtcgggcggcggtctgtctttctcggtcggcaacagcaagctcgcgcagcagaatcaatcctcgagcgtcacgaacaacgccagcacggtcggctcggtcgacggcaatctgaccgtcaatgcgggtaatacgctgcacgtgaaaggcagcgatctggtcgcgggcaaggatgtgaccgggacggcggcgaacatcgtcgtcgattcggccaccgacaccacgcgtcaagcgcaacagcagcagacgagcaagagcgggctgacggtcggcctgtcgggctcggtgggcgatgcgatcaacaatgcgatcagcgagacgcaggccgcgcgcgaatcggcgaaggatagcaacggccgcgcatcggcactgcatagcatcgcggcggccggtgatgtggcattcggcggtttgggggccaaggccctgctggacggcgcgaaggggccgcaggccccgagcatcggcgtgcaggtcagtgtcggttcgagccatagttcgatgcagtcgtcggaggatcagacgattcagcgcggctccagcattaacgcgggcggcaatgcgaagctgatcgcgacgggcaacggtacgccgaaggacggcaacatcacgatcgcgggctcgaacgtgaacgcggccaacgtggcgttggtcgcgaacaaccaggtcaatctcgtcaacacgaccgatacggacaagacgcagagttcgaactcgtcgtcggggtcgagcgtcggcgtgtcgatcggcacgaacggcatcggcgtctccgcatcgatgcagcgcgcgcacggcgacgggaattcggacgcggcgatccagaacaacacgcacatcaacgccagccagaccgcgaccattgtcagcggcggcgacacgaacgtgatcggcgcgaacgtgaacgcgaacaaggtcgtggccgacgtgggcggcaacctgaacgtggcgagcgtccaggatacgaccgtaagcgccgcgcatcagtcgagcgcgggcggcggcttcacgatcagccagaccggcggcggggctagtttcagtgcacagaacggccacgcggacggcaactatgcgggcgtgaatgagcaggcaggtatccaggccggctcgggcgggttcgacgtgaccgtgaggggcaacaccgacctgaagggcgcgtatatcgccagcacggccgatgcgtcgaagaacagtctgacgacgggcacgctcacgacgagcgacatcgagaaccactcgcactacagcgcgaacagtgcgggctttagcgctggcgcgtcagttggggtaagcaccaaggcagttgggccgtcgtcggtatcgggttcgggtggcgtcacgccgatggtgttccagaacgacagcggcgaccaaagcgcgacgacgaagagcgcggtgagcgccggcacgatcaatatcacgaagccgggcgagcagacgcaggacgtcgcgaacctgaaccgcgacacgacgaatctgaacgggaccgtttcgaagacgcctgatgtacaaaagatgctgtcgcagcaggctgacacgatgaacgccgcccaggcggccgggcagacggtgtcgcaggcgatcggtctgtatgccgaccacaagcgcgacgcagcattggacgcggctgacaaagcctataaggctggcgatttggcgggcgcacaggcggcgttgaacgaagccaagggctggatggaaggcggagcgtcgcgcgcggaattgcagatgggcggcggtgcgttgatcggcgggctcggcgggggcagcgcgcttacggcgatcggtggggcagcgggagccggcatgtcgtcactgctggcgaaccaggcagagaagatcagtaagtcggtgggtgatacgaccggctcgtcgctggtcggcaacatcgcggcgaacgtcgcggcaacggttggtggcgcactggtgggcggtagtgcgggcgcagcgatggcgtcgaatgtgcagctttataatgcaggtaacgattcgaacaatcaaacgtcaaacgacgtctttgcatcgttgtcgaagaaggttgctcaagccatcgccatgacggcagatggcaaggccggtgtctggaacggaatggtcaacgtcgcgggcgtgatcgttaatcttccgaacggcgggcccttcgcgtcgcccggcgatccgggttatgtctcactcgatgggttgaagaaaccctacaagtctggaacatcgattgggcctgacgcggagttctggacacctgtcctggcgacactgggtctcggaggcaaagcggcagccggaactggtgcgacaacaacatcggcggatgcggccacggttggaaacggtgcgctcaaaaccgccagtggagacttgagcgcagccggcaatgcggcaagaacccaaccgtatggcaatggcgcaagcgcgtcgccctcgccgggaacggcgacagcggggagttcgggagcgaatgcgcaactcccaacggccaatggtggagttgcggcggcgggtacatcatcggccacaaacgtgggcaaggttgttatcgacggcaagatcggcggccaacttgaggctcgtggatggacgcagcaagaagtgcaagcagtcgtcaatgagggacctgtcggaacgacgatggacaatcgatctgcggggaagaccccagacgggttgccgagaaatgattccgcatccgtgtacggttctaagagtggttatgttgtggtcaacgaccggaccggcgaagttgtccaggtgagcggtaaaaacgatcctggttggattcccgatagtcgaatcaaatggaagtga

SEQ ID NO: 1143 - DNA, 1443 bp, Burkholderia pseudomallei
atgaagagggtcgcgcgggcggtcgtgctcgcgtggggactgccgatgctcgccggcgtatcgattgccggcgccgcgcgcgcggacgatgcggcgcccgccgcgccggctcaggcgccgttagccgcgacgctcgcgcagcaggcgacgacgccgaacgcgctcgtcaatgccgacgccacgcaggcggtgctgccgcagccgccgatgtcgagccaggcgaaatcgaagggcttcattgccgacagccatttcgacgtgctgttgcgcaattacgcggacgtgctcgatgcgaagggcgggccgcatcgtcacgcgtgggtccagggcgtgatggcgaacttcgagtccggctatacgggcgggctgatcggcttcggcgtggacgcgtcgatctacgcggcgctgaagctcgacggcggcgcgggcggcggcaacatggtgcacgtcgcgaagggcggcggcggctcgaaccagctcgcttgggcgttccccggcatctatgacgtgaaggcgcgcatctcgaacaccgtgatcaagtacggcctgcaggcggtcgacaatccgttcatggagcagcacgacaaccgcgcgctgccgccgacgttcctcggcgcgacgatcgtgagcaacgaattcaagaacgtgatgctcgaggcgggcagcttcacgaagaccaacgcgcgcggccatacgacgctcacgaacctgacgacgcaatacggcggcacgcgcgtcgaccgcttcacgtacgtcggcggcacgtgggattattcgcagacgggctcggcgtcgttctacgcgggccaggccgacgatgtctggcgccagtactacggctcggtcaagcaaagctacggctcgccgcagacggtcaagtggacgggcttcggcaatttctattcgacgcacgacacgggcgacgcgcgccagggcaagatcgacaacaacgcgtacagcctgtcgctcgccgcgcagcacggcccgcacgagctgctgctcggctatcagcaggtgctcggcgaccagttcttcgattacctgaacgaaacgaacggcatcttcctcgtcgattcgatggacgtcgactacaacgcgccgcacgagaaatcgctgcagctgcgctacacgttctacggcaaggaggcgggcctgcccggcttcaaggcgatggtgtggggcgtgacaggctggggggcggacggctccgcgagcgcggcgctcgatccgacgcgctcgagcatctactggaaggacggcgcgccggtgcagggccgccatcacgagttcggcttcatcccgtcgtatacgatccagagcggcaagctcaaggacacgaagatcacgttcatcgcgatgtggcacgtgggttcggcgcactactcggacagtaccaaccaggaataccggctggtcgtgaacgtgccggtgaaggtgttctaa

SEQ ID NO: 1144 - DNA, 1080 bp, Burkholderia pseudomallei
atggacaaacgactgtccgcgctttgcggactgggcctcgcctcggccggcgcatgcgcgcaaacgagcgtgacgctttacggcgtcgcggacgcgtacgtcgagtacgcgacgaaccaggcggacgcgaaaggcgagcccgccgcgctcgcgcgaatgggctcgggcggcaagagcggctcgcgctggggaatcaagggcactgaagtgctcggcggcggctggcgcgccgcgttccggctcgagagcggcgtcaacctgaacaacggcgccggcacgggcgcgggcggcttcgaccgctccgcgtgggtcgggctcgagcatccgcgctggggcgcgctgcgcttcggtcgccaatacacgacgatgttcgacatcatggagcactactcgccgacgggcgcgtattcgacgctgtacgaacctgacggcgcgatcgtcggcatcagctttcgcgagaacaacgtcgtcaaatatctggcgacggccggcccgctcacgttcgaagcgcactacgcgttcagcaacgaaccgggcgcgttccaggcgagcgccgcgcacggcgcgggcttcgagtacacgggcggcgcgctgtcgttcgcgttcgcatacgacgacgtgcacacgccgcaagccggcggcttcgcgcacttgcgccgctacgcggccgccgcgatgctgaccgtcgaggcgacgcaactgatcgcgggcgccgcgcacgggcaaggcaacgtcgcgacgccatcggtcgtcacgcgctacacgttctggtggatcggcgtgcgtcaggcgatcacgcccgtcgttcaactgatcggcgcgctgtatgcggagcgcgtgcgcgcgcaaaacccggcgagcccgcccgccgcgcgacatgcgtcgggcacgccgcagcaggcgacgctgcagttgaactacttcgtctcgaaaaccacgacgctgtacgcggcaaccggttacgcgcgccacgcggcgctcgatttcgacaactataactacggcttcctccactactcgctcgccggcgcgcgcgccggcagcgcgggcgtcgccgtcggcgtgcgcaagttgttctga

SEQ ID NO: 1145 - DNA, 171 bp, Burkholderia pseudomallei
atgtccagcctcgttcaatacgtcaagcagttcgttcgcgatgaaggcggcgtcagcgccatcgaatacggcctgatcgctgcgctgatcgcgatcgtgatcatcggtgcggtgaagacggtcggcaccaacctcaactccgtcttctcgacgatcggcaacgatctgtaa

SEQ ID NO: 1146 - DNA, 219 bp, Burkholderia pseudomallei
atgagaacccagtcctttagccggaagtcgccccgtgcgcacggaatcggcgcacgtcccgctcgcgcgttcatgcgctggctgcgtgacgaatcggcggtgtccgcgatcgaatacgcgctgatcgcatcgctcatcgcgatcgtgatcatcggcgcggtgcaggtcgtcggcaccaatctgcagtcggtgttcagcaccgtcgcttcggatgtgtga

SEQ ID NO: 1147 - DNA, 1191 bp, Burkholderia pseudomallei
gtgtcgattctcgtcgcgctgatgctcgcggtgctgatcggcttcgtcggcctcgcgctggatctcggcaagctctacgtgacgcgcagcgagctgcagaacagcgcggacgcgtgcgcgctcgccgcggcgcgggatctgacgggtgccatcaatctgtccgtgccggaggcggccggcatcaccgccggccacctcaactacgcgttgttcgagcagtttccggttcagatgcagacgaactcgaacgtcacgttcagcgattcgctgagcaatccgtttcaaccgaagaacgcgatcgcgtcgccttcgtcgatcaagtacgtgaagtgcacgacatcgcgcacgggcatcgtcaactggttcatccagacgctcaacctggtgccgggcgtgaccgtgacgaacgcgtcggtgtccgcgacggccgtggcgaccgtcggcgccgcgcagaccacctgcgcgattccggtgttcatctgcaaggccggcacgcagacgagcccgcccgtggccggcgcaacctacaacatcggcgactggctctccgcgaagacgggctcgccgccgtcgttcggcgcgggcaacttcggctggtcggcgctcgacggctcgaacagcgcgtcgtcgatcgccaacgagctgacgggcaattactgcgcgctgcccgccaccggctcgcaggtcggcacgcccggcgacaaggcggcgacgaccaacgcgtacaacacgcgcttcggcatctacgcgaatccgtacaaggacccgtcgtacggcacgcccgacttcaccggcttcgcctacgacgcgaccacatggccctcgcagagcaacgcgtattcggacttcgtcagcaagcgcctgacgttcgcgagctatcagggcgacctgatcaccggcatcaacacgggcggctcgtacaacccgagctactacgcggcgggcgccgaccgcaggctcgcgctcgcgcccgaggtggactgctcggtgctgctgagcggccacagcgcgcccgtgctctcgtgggattgcgtgctgatgctcgacccgatgggctccggcggcagcgcgacgcccgtgcatctcgagtaccgcggctcgtcgaccgcgcccggcagcccgtgcgcgacgcaaggcacgccgggcaacggcagctcggtcggcccgcaggtgcccgtgctgctccaatga

SEQ ID NO: 1148 - DNA, 462 bp, Burkholderia pseudomallei
atgaacacgcgccccttcgccctcgccgggcgccgcgcgcagcgcggcatggccgccgtcgagttcgcgctcgtcgccgcgatcctctgcacgatcctgatcggcatctgcgagttcggccgcgtgctgttctactggaacaccgcgagcgaggcggtccggctcggcgcgcgcacggcggccgtctgcgacgccgacgcgtccgtcgtgaaaacccgcatcggccagttgatgccgctcatcggcagcgcgaacgtgcgcctcgcgtacacgcccgccggctgcgattccgatgcggccaccgcgcgcagcacctgcacgttcgtcaccgtgtccgtcacgaacgtgacggtcaagacgctgattccgttcgtgccgctcacgctcgcgatgccgcccttcgtcaccacgctgccccgcgaaagtctcgcgacatcgacgggcggcacggtctgccaatga

SEQ ID NO: 1149 - DNA, 432 bp, Burkholderia pseudomallei
atgcatcaggaacggcgcaaacgcaacgccgatcgccatggcacgcatccgtacgatgcggactcacgcgcggcgcctcgcgaggcgccgcgcttcgaacacgagccgaagaaacagcgcgacgccgcgcagcacgaggtcgatcgtgatcgcgcggcgcgcgaaattcgcgagcgtatcgagcacaaggcgcggcccgacgttcgccgcgccgagcggccgatatcgcaggacgtggcccagacgccgatcggtgcggcaggcgcgatcagcccgtcaaccgcgcacagcatctttctcgagatcggcctggcgctcgccggtcgtccgattcaggtccgacgaaaccgggcgccgtttacacacggaacgccgcgccggcggccggcgcgcgggccgacggcgcgcaccgcctcgccggcgcctgtttga

SEQ ID NO: 1150 - DNA, 1128 bp, Burkholderia pseudomallei
atgaacgcgaaatcgatcgcggcggcggcgctcgccgtcgcgcaggcgggcctcgcccacgcacaatcgtcggtcacgctgtacggcgcgctcgatgcgggcgttctgtggcagaacacgtccgccgcgtcgttcagcccgacggcgccgaatacgggcgccgtcgtgcgcttcaaggacggcggcgtctattcgagcctctggggcatcaagggaacggaggatctcggcggcggctaccgcgtgaattttcggctgcaaggcgcgttcgacggcggcaccggcaagttcgggctgagcgacgcgcccggtgcggtcgccgcgttcaatcagatcgcgacgctcggcgtgtccgggccgttcggcacgttcaacgcgggccggcagatcgtaccgatgatctacgcgatggccgacaccgacgtgcgcgcggcgcgcttcttcggcagcgtgctgaccgcttggctcggcctgaataccgcggccggctggccgggcaacagcacgaacgcgccgatcggcgcgctctacgacagcgatgcgctcgtctaccagtcgcccgcgttcggcggcgcgtcgctcgcgctcgagtacgcgccgggcggtgtgcccggcggcgtgcagcgcggcgcgcgcgcgtcgatcgtgctcaagtacgcgtcgaacgcgctcaacctggccgccgtctattacaacggccacgacacgaatccggcgccgggcgcgagcgcgacgggactcgacaacaaccgcttcgtctacgtcggcgcgcagtacaagctgaaggatgtcgcggtgtcggcgtcgtacggcaacggccggaatcccgcgcgcggcgatcgcgtgaacctcgacatgttcgcgttcgggctcggctaccgcgtgtcgccgttctttcgcgtgagctcgggcgtctactacctgaaggaccggaaccgttcggcgaaccggtcgacgtcgatcgtgctcggcgccgattacgagctgtccaagcacaccacgctatatgcgcagggggggcgcgtcgacaatcgcggcacgatggctcagatgctggcgtacgggcagccggtcgcgccggggctcgcgacgaccgccgcgatgctagggatgcgtcattcgttctag
